(19) United States
(12) Patent Application Publication
(10) Pub. No.: US 2007/0074312 A1
(43) Pub. Date: Mar. 29, 2007

(54) Plants containing a heterologous flavohemoglobin gene and methods of use thereof

(76) Inventors: Amarjit Basra, Chesterfield, MO (US); Mike Edgerton, St. Louis, MO (US); Garrett J. Lee, Royersford, PA (US); Maolong Lu, St. Louis, MO (US); Linda L. Lutfiyya, St. Louis, MO (US); Wei Wu, St. Louis, MO (US); Xiaoyun Wu, Chesterfield, MO (US)

Correspondence Address: MONSANTO COMPANY, 800 N. LINDBERGH BLVD., ATTENTION: GAIL P. WUELLNER, IP PARALEGAL, (E2NA), ST. LOUIS, MO, 63167, US

(21) Appl. No.: 11/429,629

(22) Filed: May 5, 2006

Related U.S. Application Data
(60) Provisional application No. 60/678,166, filed on May 5, 2005.

(51) Int. Cl. A01H 1/00; A01H 5/00; C12N 15/82; C12N 5/04

(52) U.S. Cl. 800/288; 800/320.2; 435/468; 435/419

(57) ABSTRACT

Plant nitrogen use efficiency in corn has been improved by transformation with a flavohemoglobin gene. Plants comprising a flavohemoglobin gene have decreased nitric oxide (NO) levels, increased biomass accumulation under a sufficient nitrogen growth condition, and increased chlorophyll content under a limiting nitrogen growth condition. Additionally, these transformed plants evidence higher levels of yield.

### CROSS REFERENCE TO RELATED APPLICATIONS

[0001] This application claims benefit under 35USC § 119(e) of U.S. provisional application Ser. No. 60/678,166, filed May 5, 2005, and herein incorporated by reference in its entirety.

### INCORPORATION OF SEQUENCE LISTING

[0002] Two copies of the sequence listing (Copy 1 and Copy 2) and a computer readable form (CRF) of the sequence listing, all on CD-R's, each containing the file named 52267B_{—}05052006.5T25.txt, which is 779,000 bytes (measured in MS-WINDOWS) and was created on May 5, 2006, are herein incorporated by reference

### FIELD OF THE INVENTION

[0003] Disclosed herein are inventions in the field of plant genetics and developmental biology. More specifically, the present inventions provide transgenic seeds for crops, wherein the genome of said seed comprises recombinant DNA for expression of a heterologous flavohemoglobin protein, which results in the production of transgenic plants with increased growth, yield and/or improved nitrogen use efficiency.

### BACKGROUND OF THE INVENTION

[0004] Nitrogen is often the limiting element in plant growth and productivity. Metabolism, growth and development of plants are profoundly affected by their nitrogen supply. Restricted nitrogen supply alters shoot to root ratio, root development, activity of enzymes of primary metabolism and the rate of senescence (death) of older leaves. All field crops have a fundamental dependence on inorganic nitrogenous fertilizer. Since fertilizer is rapidly depleted from most soil types, it must be supplied to growing crops two or three times during the growing season. Nitrogenous fertilizer, which is usually supplied as ammonium nitrate, potassium nitrate, or urea, typically accounts for 40% of the costs associated with crops such as corn and wheat. It has been estimated that approximately 11 million tons of nitrogenous fertilizer are used in both North America and Western Europe annually, costing farmers $2.2 billion each year (Sheldrick, 1987, World Nitrogen Survey, Technical Paper no. 59, Washington, D.C.). Furthermore, World Bank projections suggest that annual nitrogen fertilizer demand worldwide will increase from around 90 million tons to well over 130 million tons over the next ten years. Increased use efficiency of nitrogen by plants should enable crops to be cultivated with lower fertilizer input, or alternatively on soils of poorer quality and would therefore have significant economic impact in both developed and developing agricultural systems.

[0005] Using conventional selection techniques, plant breeders have attempted to improve nitrogen use efficiency by exploiting the variation available in natural populations of corn, wheat, rice and other crop species. There are, however, considerable difficulties associated with the screening of extensive populations in conventional breeding programs for traits which are difficult to assess under field conditions, and such selection strategies have been largely unsuccessful. Recent advances in genetic engineering have provided the prerequisite tools to transform plants to contain foreign (often referred to as “heterogenous or heterologous”) or improved endogenous genes. The ability to introduce specific DNA into plant genomes provides further opportunities for generation of plants with improved and/or unique phenotypes.

[0006] Flavohemoglobins, composed of a heme-binding domain and a ferredoxin reductase-like domain, detoxify high levels of nitric oxide (NO) through oxygenation of NO to NO₃⁻, functioning as an NO dioxygenase (NOD) in Escherichia coli (Vasudevan et al., 1991, Mol. Gen. Genet. 226: 49-58, and Gardener et al., 2002, J. of Biological Chemistry 270: 8166-8171).

[0007] It has been reported that NO can participate in many physiological responses in plants, including pathogen response, programmed cell death, germination (Beligni and Lamattina, 2000, Planta. 210: 215-221), phytoalexin production (Noritake, et al., 1996), and ethylene emission (Leshem, 2000, J. Exp. Bot. 51: 1471-1473). In addition, NO was found to have a critical role in salicylic acid signaling (Klessig, et al., 2000, Proc. Natl. Acad. Sci. USA. 97: 8849-8855), and cytokinin signaling. It was found that NO gives rise to parallel signaling pathways through increased nitric oxide synthase (NOS, EC1.14.13.39) activity, which mediate responses of specific genes to UV-B tolerance. Furthermore, nitric oxide has been reported to mediate photomorphogenic responses in wheat, lettuce, potato and A. thaliana, promote root elongation in corn (Gouvea, 1997, Plant Growth Regulation 21: 183-187), and promote ripening in strawberry and avocado (Leshem and Pinchasov, 2000, J. Exp. Bot. 51:1471-1473). Involvement of NO in the tobacco defense response is perhaps the best documented role played by nitric oxide in plant signaling (Klessig, et al., 2000, Proc. Natl, Acad. Sci USA 97:8849-8855; Foissner, et al., 2000, Plant J. 23: 817-824).

[0008] We thus contemplated that the removal of endogenous NO by overexpression of NO detoxifying enzymes can uncover what role(s) NO plays in the expression of agronomic traits in corn, such as kernel maturation, leaf senescence, disease resistance, root growth and/or photomorphogensis. Overexpression of enzymes activated by NO may also affect similar processes. In both cases agronomic traits may also be improved by either a reduction in nitrosative stress or an amplification of NO signaling. The present invention is based, in part, on our surprising finding that expression of an E. coli flavohemoglobin in corn plants resulted in more robust growth characteristics under either sufficient or limiting nitrogen growth conditions, and increased seed yield.

### SUMMARY OF THE INVENTION

[0009] The present invention is directed to seed from a transgenic plant line, wherein said seed comprises in its genome a recombinant polynucleotide providing for expression of a flavohemoglobin protein. Of particular interest, the present invention provides transgenic seed containing a flavohemoglobin protein to produce transgenic plants having improved agronomic traits. The improved agronomic traits are characterized as a faster growth rate, increased fresh or dry biomass, increased seed or fruit yield, increased seed or fruit nitrogen content, increased free amino acid content in seed or fruit, increased protein content in seed or fruit; and/or increased protein content in vegetative tissue under a sufficient nitrogen growth condition or a limiting nitrogen growth condition. Also of particular interest in the present invention is seed from transgenic crop plants, preferably maize (corn—Zea mays) or soybean (soy—Glycine max) plants. Other plants of interest in the present invention for production of transgenic seed comprising a heterologous flavohemoglobin gene include, without limitation, cotton, canola, wheat, sunflower, sorghum, alfalfa, barley, millet, rice, tobacco, fruit and vegetable crops, and turfgrass.

[0010] Therefore, in accomplishing the above, the present invention, in one aspect, provides three non-naturally occurring polynucleotides, as set forth in SEQ ID NO 1, 2, and 260 with optimized plant expression codons for expressing E. coli HMP protein, Yeast YHB1 protein and Erwinia flavohemoglobin protein in plants respectively. The present invention further provides recombinant DNA constructs for plant transformation containing a flavohemoglobin gene under the control of a promoter for plant expression.

[0011] The present invention, in another aspect, provides the methods of generating a transgenic plant having improved agronomic traits including a faster growth rate, increased fresh or dry biomass, increased seed or fruit yield, increased seed or fruit nitrogen content, increased free amino acid content in seed or fruit, increased protein content in seed or fruit, and/or increased protein content in vegetative tissue. The method comprises the steps of transforming a plant cell with a recombinant DNA construct for expression of a flavohemoglobin protein, regenerating the transformed plant cell into a transgenic plant expressing the flavohemoglobin protein, and screening to identify a plant having improved agronomic traits. The improved agronomic traits are characterized as a faster growth rate, increased growth rate, increased seed or fruit nitrogen content, increased free amino acid content in seed or fruit, and/or increased protein content in vegetative tissue either under a sufficient nitrogen growth condition or a limiting nitrogen condition.

[0012] The present invention, in yet another aspect, provides exemplary flavohemoglobin proteins identified as homologs of E. Coli HMP as set forth in SEQ ID NO: 130 through SEQ ID NO: 256, which can be used to practice the present invention.

### BRIEF DESCRIPTION OF THE DRAWINGS AND SEQUENCE LISTING

[0013] FIG. 1. Molecular function of a flavohemoglobin protein in a plant cell

[0014] FIG. 2. Recombinant DNA construct pMON69471 comprising SEQ ID NO:3 for plant transformation

[0015] FIG. 3. Recombinant DNA construct pMON67827 comprising SEQ ID NO:4 for plant transformation

[0016] FIG. 4. Recombinant DNA construct pMON95605 comprising SEQ ID NO:105 for plant transformation

[0017] FIG. 5. Corn transformation construct pMON99286 for expression of codon optimized E. coli HMP gene

[0018] FIG. 6. Corn transformation construct pMON99261 for expression of codon optimized E. coli HMP gene

[0019] FIG. 7. Corn transformation construct pMON99276 for expression of codon optimized E. coli HMP gene

[0020] FIG. 8. Corn transformation construct pMON94446 for expression of E. coli HMP gene

[0021] FIG. 9. Corn transformation construct pMON102760 for expression of Yeast YHB gene

[0022] FIG. 10. Soybean transformation construct pMON95622 for expression of E. coli HMP gene

SEQ ID NO:1, the codon optimized E. coli HMP gene

SEQ ID NO:2, the codon optimized Yeast YHB gene

SEQ ID NO:3, E. coli HMP gene

SEQ ID NO:4: Yeast YHB gene

SEQ ID NO:5, E. coli HMP protein

SEQ ID NO:6, Yeast YHB protein

SEQ ID NO:7 through SEQ ID NO: 129, DNA sequences of E. coli HMP homologs

[0023] SEQ ID NO:130 though SEQ ID NO:256, protein sequences of E. coli HMP homologs

TABLE 1
The following table lists a DNA sequence identified as
NUC SEQ ID NO and the flavohemoglobin protein sequence,
encoded by the corresponding DNA, identified by
PEP SEQ ID NO.

| NUC | | NUC | | NUC | | NUC | |
|---|---|---|---|---|---|---|---|
| SEQ ID | | SEQ ID | | SEQ ID | | SEQ ID | |
| encodes PEP | | encodes PEP | | encodes PEP | | encodes PEP | |
| SEQ ID | | SEQ ID | | SEQ ID | | SEQ ID | |
| NUC | PEP | NUC | PEP | NUC | PEP | NUC | PEP |
| SEQ | SEQ | SEQ | SEQ | SEQ | SEQ | SEQ | SEQ |
| ID | ID | ID | ID | ID | ID | ID | ID |
| 1 | 5 | 2 | 6 | 3 | 5 | 4 | 6 |
| 7 | 130 | 37 | 161 | 68 | 192 | 99 | 223 |
| 8 | 131 | 38 | 162 | 69 | 193 | 100 | 226 |
| 9 | 132 | 39 | 163 | 70 | 194 | 101 | 227 |
| 10 | 133 | 40 | 164 | 71 | 195 | 102 | 228 |
| 11 | 134 | 41 | 165 | 72 | 196 | 103 | 230 |
| 12 | 135 | 42 | 166 | 73 | 197 | 104 | 231 |
| 13 | 136 | 43 | 167 | 74 | 198 | 105 | 232 |
| 14 | 137 | 44 | 168 | 75 | 199 | 106 | 233 |
| 15 | 138 | 45 | 169 | 76 | 200 | 107 | 234 |
| 16 | 140 | 46 | 170 | 77 | 201 | 108 | 235 |
| 17 | 141 | 47 | 171 | 78 | 202 | 109 | 236 |
| 18 | 142 | 48 | 172 | 79 | 203 | 110 | 237 |
| 19 | 143 | 49 | 173 | 80 | 204 | 111 | 238 |
| 20 | 144 | 50 | 174 | 81 | 205 | 112 | 239 |
| 21 | 145 | 51 | 175 | 82 | 206 | 113 | 240 |
| 22 | 146 | 52 | 176 | 83 | 207 | 114 | 241 |
| 23 | 147 | 53 | 177 | 84 | 208 | 115 | 242 |
| 24 | 148 | 54 | 178 | 85 | 209 | 116 | 243 |
| 25 | 149 | 55 | 179 | 86 | 210 | 117 | 244 |
| 26 | 150 | 56 | 180 | 87 | 211 | 118 | 245 |
| 27 | 151 | 57 | 181 | 88 | 212 | 119 | 246 |
| 28 | 152 | 58 | 182 | 89 | 213 | 120 | 247 |
| 29 | 153 | 59 | 183 | 90 | 214 | 121 | 248 |
| 30 | 154 | 60 | 184 | 91 | 215 | 122 | 249 |
| 31 | 155 | 61 | 185 | 92 | 216 | 123 | 250 |
| 32 | 156 | 62 | 186 | 93 | 217 | 124 | 251 |
| 33 | 157 | 63 | 187 | 94 | 218 | 125 | 252 |
| 34 | 158 | 64 | 188 | 95 | 219 | 126 | 253 |
| 35 | 159 | 65 | 189 | 96 | 220 | 127 | 254 |
| 36 | 160 | 66 | 190 | 97 | 221 | 128 | 255 |
| 37 | 161 | 67 | 191 | 98 | 222 | 129 | 256 |

SEQ ID NO: 257, the full length sequence of recombinant DNA construct pMON69471
SEQ ID NO: 258, the full length sequence of recombinant DNA construct pMON67827
SEQ ID NO: 259, the full length sequence of recombinant DNA construct pMON95605
SEQ ID NO: 260, the codon optimized HMP gene from Erwinia carotovora
SEQ ID NO: 261, the full length sequence of recombinant DNA construct pMON99286
SEQ ID NO: 262, the full length sequence of recombinant DNA construct pMON99261
SEQ ID NO: 263, the full length sequence of recombinant DNA construct pMON99276
SEQ ID NO: 264, the full length sequence of recombinant DNA construct pMON94446
SEQ ID NO: 265, the full length sequence of recombinant DNA construct pMON102760
SEQ ID NO: 266, the full length sequence of recombinant DNA construct pMON95622
SEQ ID NO: 267 through SEQ ID NO: 272: PCR primers.

### DETAILED DESCRIPTION OF THE INVENTION

[0024] The present invention is directed to transgenic plant seed, wherein the genome of said transgenic plant seed comprises a recombinant DNA encoding a flavohemoglobin, as provided herein, and transgenic plant grown from such seed. Transgenic plant provided by the present invention possesses an improved trait as compared to the trait of a control plant under either limited nitrogen growth condition or sufficient nitrogen growth condition. Of particular interest are the transgenic plants grown from transgenic seeds provided herein wherein the improved trait is increased seed yield. Recombinant DNA constructs disclosed by the present invention comprise recombinant DNA providing for the production of mRNA to modulate gene expression, imparting improved traits to plants.

[0025] As used herein, “flavohemoglobin” refers to a protein that is composed of a heme binding domain and a ferredoxin reductase-like FAD- and NAD-binding domain. It is also known as flavohemoprotein, nitric oxide dioxygenase, nitric oxide oxygenase and flavodoxin reductase. Flavohemoglobin genes from E. coli, A. eutrophus, Saccharomyces cerevisiae and Vitreoscilla sp are abbreviated as HMP, FHP, YHB1 (or YHG), and VHP respectively.

[0026] As used herein, “gene” refers to chromosomal DNA, plasmid DNA, cDNA, synthetic DNA, or other DNA that encodes a peptide, polypeptide, protein, or RNA molecule, and regions flanking the coding sequences involved in the regulation of expression.

[0027] As used herein, “transgenic seed” refers to a plant seed whose genome has been altered by the incorporation of recombinant DNA, e.g., by transformation as described herein. The term “transgenic plant” is used to refer to the plant produced from an original transformation event, or progeny from later generations or crosses of a plant to a transformed plant, so long as the progeny contains the recombinant DNA in its genome.

[0028] As used herein, “recombinant DNA” refers to a polynucleotide having a genetically engineered modification introduced through combination of endogenous and/or exogenous elements in a transcription unit, manipulation via mutagenesis, restriction enzymes, and the like or simply by inserting multiple copies of a native transcription unit. Recombinant DNA may comprise DNA segments obtained from different sources, or DNA segments obtained from the same source, but which have been manipulated to join DNA segments which do not naturally exist in the joined form. A recombinant polynucleotide may exist outside of the cell, for example as a PCR fragment, or integrated into a genome, such as a plant genome.

[0029] As used herein, “trait” refers to a physiological, morphological, biochemical, or physical characteristic of a plant or particular plant material or cell. In some instances, this characteristic is visible to the human eye, such as seed or plant size, or can be measured by biochemical techniques, such as detecting the protein, starch, or oil content of seed or leaves, or by observation of a metabolic or physiological process, e.g., by measuring uptake of carbon dioxide, or by the observation of the expression level of a gene or genes, e.g., by employing Northern analysis, RT-PCR, microarray gene expression assays, or reporter gene expression systems, or by agricultural observations such as stress tolerance, yield, or pathogen tolerance.

[0030] As used herein, “control plant” is a plant without recombinant DNA disclosed herein. A control plant is used to measure and compare trait improvement in a transgenic plant with such recombinant DNA. A suitable control plant may be a non-transgenic plant of the parental line used to generate a transgenic plant herein. Alternatively, a control plant may be a transgenic plant that comprises an empty vector or marker gene, but does not contain the recombinant DNA that produces the trait improvement. A control plant may also be a negative segregant progeny of hemizygous transgenic plant.

[0031] As used herein, “improved trait” refers to a trait with a detectable improvement in a transgenic plant relative to a control plant or a reference. In some cases, the trait improvement can be measured quantitatively. For example, the trait improvement can entail at least a 2% desirable difference in an observed trait, at least a 5% desirable difference, at least about a 10% desirable difference, at least about a 20% desirable difference, at least about a 30% desirable difference, at least about a 50% desirable difference, at least about a 70% desirable difference, or at least about a 100% difference, or an even greater desirable difference. In other cases, the trait improvement is only measured qualitatively. It is known that there can be a natural variation in a trait. Therefore, the trait improvement observed entails a change of the normal distribution of the trait in the transgenic plant compared with the trait distribution observed in a control plant or a reference, which is evaluated by statistical methods provided herein. Trait improvement includes, but not limited to, yield increase, including increased yield under non-stress conditions and increased yield under environmental stress conditions. Stress conditions may include, for example, drought, shade, fungal disease, viral disease, bacterial disease, insect infestation, nematode infestation, cold temperature exposure, heat exposure, osmotic stress, reduced nitrogen nutrient availability, reduced phosphorus nutrient availability and high plant density.

[0032] Many agronomic traits can affect “yield”, including without limitation, plant height, pod number, pod position on the plant, number of internodes, incidence of pod shatter, grain size, efficiency of nodulation and nitrogen fixation, efficiency of nutrient assimilation, resistance to biotic and abiotic stress, carbon assimilation, plant architecture, resistance to lodging, percent seed germination, seedling vigor, and juvenile traits. Other traits that can affect yield include, efficiency of germination (including germination in stressed conditions), growth rate (including growth rate in stressed conditions), ear number, seed number per ear, seed size, composition of seed (starch, oil, protein) and characteristics of seed fill. Also of interest is the generation of transgenic plants that demonstrate desirable phenotypic properties that may or may not confer an increase in overall plant yield. Such properties include enhanced plant morphology, plant physiology or improved components of the mature seed harvested from the transgenic plant.

[0033] As used herein, “sufficient nitrogen growth condition” refers to the growth condition where the soil or growth medium contains or receives enough amounts of nitrogen nutrient to sustain a healthy plant growth and/or for a plant to reach its typical yield for a particular plant species or a particular strain. Sufficient nitrogen growth conditions vary between species and for varieties within a species, and also vary between different geographic locations. However, one skilled in the art knows what constitute nitrogen non-limiting growth conditions for the cultivation of most, if not all, important crops, in a specific geographic location. For example, for the cultivation of wheat see Alcoz, et al., Agronomy Journal 85:1198-1203 (1993), Rao and Dao, J. Am. Soc. Agronomy 84:1028-1032 (1992), Howard and Lessman, Agronomy Journal 83:208-211 (1991); for the cultivation of corn see Wood, et al., J. of Plant Nutrition 15: 487-500 (1992), Tollenear, et al., Agronomy Journal 85:251-255 (1993), Straw, et al., Tennessee Farm and Home Science: Progress Report, 166:20-24 (Spring 1993), Dara, et al., J. Am. Soc. Agronomy 84:1006-1010 (1992), Binford, et al., Agronomy Journal 84:53-59 (1992); for the cultivation of soybean see Chen, et al., Canadian Journal of Plant Science 72:1049-1056 (1992), Wallace, et al. Journal of Plant Nutrition 13:1523-1537 (1990); for the cultivation of rice see Oritani and Yoshida, Japanese Journal of Crop Science 53:204-212 (1984); for the cultivation of tomato see Grubinger, et al., Journal of the American Society for Horticultural Science 118:212-216 (1993), Cerne, M., Acta Horticulture 277:179-182, (1990); for the cultivation of pineapple see Asoegwu, S. N., Fertilizer Research 15:203-210 (1988), Asoegwu, S. N., Fruits 42:505-509 (1987), for the cultivation of lettuce see Richardson and Hardgrave, Journal of the Science of Food and Agriculture 59:345-349 (1992); for the cultivation of potato see Porter and Sisson, American Potato Journal, 68:493-505 (1991); for the cultivation of brassica crops see Rahn, et al., Conference “Proceedings, second congress of the European Society for Agronomy” Warwick Univ., p. 424-425 (Aug. 23-28, 1992); for the cultivation of banana see Hegde and Srinivas, Tropical Agriculture 68:331-334 (1991), Langenegger and Smith, Fruits 43:639-643 (1988); for the cultivation of strawberries see Human and Kotze, Communications in Soil Science and Plant Analysis 21:771-782 (1990); for the cultivation of sorghum see Mahalle and Seth, Indian Journal of Agricultural Sciences 59:395-397 (1989); for the cultivation of sugar can e see Yadav, R. L., Fertiliser News 31:17-22 (1986), Yadav and Sharma, Indian Journal of Agricultural Sciences 53:38-43 (1983); for the cultivation of sugar beet see Draycott, et al., Conference “Symposium Nitrogen and Sugar Beet” International Institute for Sugar Beet Research—Brussels Belgium, p. 293-303 (1983). See also Goh and Haynes, “Nitrogen and Agronomic Practice” in Mineral Nitrogen in the Plant-Soil System, Academic Press, Inc., Orlando, Fla., p. 379-468 (1986), Engelstad, O. P., Fertilizer Technology and Use, Third Edition, Soil Science Society of America, p. 633 (1985), Yadav and Sharmna, Indian Journal of Agricultural Sciences, 53:3-43 (1983).

[0034] As used herein, “nitrogen nutrient” means any one or any mix of the nitrate salts commonly used as plant nitrogen fertilizer, including, but not limited to, potassium nitrate, calcium nitrate, sodium nitrate, ammonium nitrate. The term ammonium as used herein means any one or any mix of the ammonium salts commonly used as plant nitrogen fertilizer, e.g., ammonium nitrate, ammonium chloride, ammonium sulfate, etc. One skilled in the art would recognize what constitute such soil, media and fertilizer inputs for most plant species.

[0035] “Limiting nitrogen growth condition” used herein refers to a plant growth condition that does not contain sufficient nitrogen nutrient to maintain a healthy plant growth and/or for a plant to reach its typical yield under a sufficient nitrogen growth condition. For example, a limiting nitrogen condition can refers to a growth condition with 50% or less of the conventional nitrogen inputs.

[0036] As used herein, “increased yield” of a transgenic plant of the present invention may be evidenced and measured in a number of ways, including test weight, seed number per plant, seed weight, seed number per unit area (i.e., seeds, or weight of seeds, per acre), bushels per acre, tons per acre, kilo per hectare. For example, maize yield may be measured as production of shelled corn kernels per unit of production area, e.g., in bushels per acre or metric tons per hectare, often reported on a moisture adjusted basis, e.g., at 15.5% moisture. Increased yield may result from improved utilization of key biochemical compounds, such as nitrogen, phosphorous and carbohydrate, or from improved tolerance to environmental stresses, such as cold, heat, drought, salt, and attack by pests or pathogens. Trait-improving recombinant DNA may also be used to provide transgenic plants having improved growth and development, and ultimately increased yield, as the result of modified expression of plant growth regulators or modification of cell cycle or photosynthesis pathways.

[0037] As used herein, “promoter” includes reference to a region of DNA upstream from the start of transcription and involved in recognition and binding of RNA polymerase and other proteins to initiate transcription. A “plant promoter” is a promoter capable of initiating transcription in plant cells whether or not its origin is a plant cell. Exemplary plant promoters include, but are not limited to, those that are obtained from plants, plant viruses, and bacteria which comprise genes expressed in plant cells such Agrobacterium or Rhizobium. Examples of promoters under developmental control include promoters that preferentially initiate transcription in certain tissues, such as leaves, roots, or seeds. Such promoters are referred to as “tissue preferred”. Promoters which initiate transcription only in certain tissues are referred to as “tissue specific”. A “cell type” specific promoter primarily drives expression in certain cell types in one or more organs, for example, vascular cells in roots or leaves. An “inducible” or “repressible” promoter is a promoter which is under environmental control. Examples of environmental conditions that may effect transcription by inducible promoters include anaerobic conditions, or certain chemicals, or the presence of light. Tissue specific, tissue preferred, cell type specific, and inducible promoters constitute the class of “non-constitutive” promoters. A “constitutive” promoter is a promoter which is active under most conditions. As used herein, “antisense orientation” includes reference to a polynucleotide sequence that is operably linked to a promoter in an orientation where the antisense strand is transcribed. The antisense strand is sufficiently complementary to an endogenous transcription product such that translation of the endogenous transcription product is often inhibited. As used herein, “operably linked” refers to the association of two or more nucleic acid fragments on a single nucleic acid fragment so that the function of one is affected by the other. For example, a promoter is operably linked with a coding sequence when it is capable of affecting the expression of that coding sequence (i.e., that the coding sequence is under the transcriptional control of the promoter). Coding sequences can be operably linked to regulatory sequences in sense or antisense orientation.

[0038] As used herein, “consensus sequence” refers to an artificial, amino acid sequence of conserved parts of the proteins encoded by homologous genes, e.g., as determined by a CLUSTALW alignment of amino acid sequence of homolog proteins.

[0039] Homologous genes are genes related to a second gene, which encode proteins with the same or similar biological function to the protein encoded by the second gene. Homologous genes may be generated by the event of speciation (see ortholog) or by the event of genetic duplication (see paralog). “Orthologs” refer to a set of homologous genes in different species that evolved from a common ancestral gene by specification. Normally, orthologs retain the same function in the course of evolution; and “paralogs” refer to a set of homologous genes in the same species that have diverged from each other as a consequence of genetic duplication. Thus, homologous genes can be from the same or a different organism. As used herein, “homolog” means a protein that performs the same biological function as a second protein including those identified by sequence identity search.

[0040] Percent identity refers to the extent to which two optimally aligned DNA or protein segments are invariant throughout a window of alignment of components, e.g., nucleotide sequence or amino acid sequence. An “identity fraction” for aligned segments of a test sequence and a reference sequence is the number of identical components which are shared by sequences of the two aligned segments divided by the total number of sequence components in the reference segment over a window of alignment which is the smaller of the full test sequence or the full reference sequence. “Percent identity” (“% identity”) is the identity fraction times 100. “% identity to a consensus amino acid sequence” is 100 times the identity fraction in a window of alignment of an amino acid sequence of a test protein optimally aligned to consensus amino acid sequence of this invention.

Recombinant DNA Constructs

[0041] As used herein, “expression” refers to transcription of DNA to produce RNA. The resulting RNA may be without limitation mRNA encoding a protein, antisense RNA that is complementary to an mRNA encoding a protein, or an RNA transcript comprising a combination of sense and antisense gene regions, such as for use in RNAi technology. Expression as used herein may also refer to production of encoded protein from mRNA. “Ectopic expression” refers to the expression of an RNA molecule or a protein in a cell type other than a cell type in which the RNA or the protein is normally expressed, or at a time other than a time at which the RNA or the protein is normally expressed, or at a expression level other than the level at which the RNA normally is expressed. “Overexpression” used herein indicates that the expression level of a target protein, in a transgenic plant or in a host cell of the transgenic plant, exceeds levels of expression in a non-transgenic plant. In a preferred embodiment of the present invention, a recombinant DNA construct comprises the polynucleotide of interest in the sense orientation relative to the promoter to achieve gene overexpression.

[0042] The present invention provides recombinant DNA constructs comprising a polynucleotide disclosed herein, which encodes for a flavohemoglobin protein. Such constructs also typically comprise a promoter operatively linked to said polynucleotide to provide for expression in a target plant. Other construct components may include additional regulatory elements, such as 5′ or 3′ untranslated regions (such as polyadenylation sites), intron regions, and transit or signal peptides.

[0043] In a preferred embodiment, a polynucleotide of the present invention is operatively linked in a recombinant DNA construct to a promoter functional in a plant to provide for expression of the polynucleotide in the sense orientation such that a desired polypeptide is produced to achieve overexpression or ectopic expression.

[0044] Recombinant constructs prepared in accordance with the present invention may also generally include a 3′ untranslated DNA region (UTR) that typically contains a polyadenylation sequence following the polynucleotide coding region. Examples of useful 3′ UTRs include those from the nopaline synthase gene of Agrobacterium tumefaciens (nos), a gene encoding the small subunit of a ribulose-1,5-bisphosphate carboxylase-oxygenase (rbcS), and the T7 transcript of Agrobacterium tumefaciens. Constructs and vectors may also include a transit peptide for targeting of a gene target to a plant organelle, particularly to a chloroplast, leucoplast or other plastid organelle. For descriptions of the use of chloroplast transit peptides, see U.S. Pat. No. 5,188,642 and U.S. Pat. No. 5,728,925, incorporated herein by reference.

[0045] The recombinant DNA construct may include other elements. For example, the construct may contain DNA segments that provides replication function and antibiotic selection in bacterial cells. For example, the construct may contain an E. coli origin of replication such as ori322 or a broad host range origin of replication such as oriV, oriRi or oriColE.

[0046] The construct may also comprise a selectable marker such as an Ec-ntpII-Tn5 that encodes a neomycin phosphotransferase II gene obtained from Tn5 conferring resistance to a neomycin and kanamysin, Spc/Str that encodes for Tn7 aminoglycoside adenyltransferase (aadA) conferring resistance to spectinomycin or streptomycin, or a gentamicin (Gm, Gent) or one of many known selectable marker gene.

[0047] The vector or construct may also include a screenable marker and other elements as appropriate for selection of plant or bacterial cells having DNA constructs of the invention. DNA constructs are designed with suitable selectable markers that can confer antibiotic or herbicide tolerance to the cell. The antibiotic tolerance polynucleotide sequences include, but are not limited to, polynucleotide sequences encoding for proteins involved in tolerance to kanamycin, neomycin, hygromycin, and other antibiotics known in the art. An antibiotic tolerance gene in such a vector may be replaced by herbicide tolerance gene encoding for 5-enolpyruvylshikimate-3-phosphate synthase (EPSPS, described in U.S. Pat. Nos. 5,627,061, and 5,633,435; Padgette, et al. Herbicide Resistant Crops, Lewis Publishers, 53-85, 1996; and in Penaloza-Vazquez, et al., Plant Cell Reports 14:482-487, 1995) and aroA (U.S. Pat. No. 5,094,945) for glyphosate tolerance, bromoxynil nitrilase (Bxn) for Bromoxynil tolerance (U.S. Pat. No. 4,810,648), phytoene desaturase (crtl (Misawa, et al., Plant J. 4:833-840, 1993; and Misawa, et al., Plant J. 6:481-489, 1994) for tolerance to norflurazon, acetohydroxyacid synthase (AHAS, Sathasiivan, et al., Nucl. Acids Res. 18:2188-2193, 1990). Herbicides for which transgenic plant tolerance has been demonstrated and for which the method of the present invention can be applied include, but are not limited to: glyphosate, sulfonylureas, imidazolinones, bromoxynil, delapon, cyclohezanedione, protoporphyrionogen oxidase inhibitors, and isoxaslutole herbicides.

[0048] Other examples of selectable markers, screenable markers and other elements are well known in the art and may be readily used in the present invention. Those skilled in the art should refer to the following for details (for selectable markers, see Potrykus, et al., Mol. Gen. Genet. 199:183-188, 1985; Hinchee, et al., Bio. Techno. 6:915-922, 1988; Stalker, et al., J. Biol. Chem. 263:6310-6314, 1988; European Patent Application 154,204; Thillet, et al., J. Biol. Chem. 263:12500-12508, 1988; for screenable markers see, Jefferson, Plant Mol. Biol, Rep. 5: 387-405, 1987; Jefferson, et al., EMBO J. 6: 3901-3907, 1987; Sutcliffe, et al., Proc. Natl. Acad. Sci. U.S.A. 75: 3737-3741, 1978; Ow, et al., Science 234: 856-859, 1986; Ikatu, et al., Bio. Technol. 8: 241-242, 1990; and for other elements see, European Patent Application Publication Number 0218571; Koziel et al., Plant Mol. Biol. 32: 393-405; 1996).

[0049] In one embodiment of the present invention, recombinant DNA constructs also include a transit peptide for targeting of a gene target to a plant organelle, particularly to a chloroplast, leucoplast or other plastid organelle. For descriptions of the use of chloroplast transit peptides see U.S. Pat. No. 5,188,642 and U.S. Pat. No. 5,728,925, incorporated herein by reference. For description of the transit peptide region of an Arabidopsis EPSPS gene useful in the present invention, see Klee, H. J. et al., (MGG (1987) 210:437-442).

[0050] The essential components of the expression cassette in the recombinant DNA construct of the present invention are operably linked with each other in a specific order to cause the expression of the desired gene product, i.e., flavohemoglobin protein, in a plant. Specific orders of operably linked essential components of the expression vectors are illustrated in FIG. 2-4.

Recombinant DNA and Polynucleotides

[0051] As used herein, both terms “a coding sequence” and “a coding polynucleotide molecule” mean a polynucleotide molecule that can be translated into a polypeptide, usually via mRNA, when placed under the control of appropriate regulatory molecules. The boundaries of the coding sequence are determined by a translation start codon at the 5′-terminus and a translation stop codon at the 3′-terminus. A coding sequence can include, but is not limited to, genomic DNA, cDNA, and chimeric polynucleotide molecules. A coding sequence can be an artificial DNA. An artificial DNA, as used herein means a DNA polynucleotide molecule that is non-naturally occurring.

[0052] Exemplary polynucleotides comprising a coding sequence for a flavohemoglobin for use in the present invention to improve traits in plants are provided herein as SEQ ID NO: 3 and SEQ ID NO: 4, as well as the homologs of such DNA molecules. A subset of the exemplary DNA includes fragments of the disclosed full polynucleotides consisting of oligonucleotides of at least 15, preferably at least 16 or 17, more preferably at least 18 or 19, and even more preferably at least 20 or more, consecutive nucleotides. Such oligonucleotides are fragments of the larger molecules having a sequence selected from the group consisting of SEQ ID NO: 1 through SEQ ID NO: 4, and SEQ ID NO: 7 through SEQ ID NO: 129, and find use, for example, as probes and primers for detection of the polynucleotides of the present invention.

[0053] Also of interest in the present invention are variants of the DNA provided herein. Such variants may be naturally occurring, including DNA from homologous genes from the same or a different species, or may be non-natural variants, i.e. an artificial DNA, for example DNA synthesized using chemical synthesis methods, or generated using recombinant DNA techniques. Degeneracy of the genetic code provides the possibility to substitute at least one base of the protein encoding sequence of a gene with a different base without causing the amino acid sequence of the polypeptide produced from the gene to be changed. Hence, a DNA useful in the present invention may have any base sequence that has been changed from the sequences provided herein by substitution in accordance with degeneracy of the genetic code. Artificial DNA molecules can be designed by a variety of methods, such as, methods known in the art that are based upon substituting the codon(s) of a first polynucleotide to create an equivalent, or even an improved, second-generation artificial polynucleotide, where this new artificial polynucleotide is useful for enhanced expression in transgenic plants. The design aspect often employs a codon usage table. The table is produced by compiling the frequency of occurrence of codons in a collection of coding sequences isolated from a plant, plant type, family or genus. Other design aspects include reducing the occurrence of polyadenylation signals, intron splice sites, or long AT or GC stretches of sequence (U.S. Pat. No. 5,500,365, specifically incorporated herein by reference in its entirety). Full length coding sequences or fragments thereof can be made of artificial DNA using methods known to those skilled in the art. Such exemplary artificial DNA molecules provided by the present invention are set forth as SEQ ID NO: 1, 2 and 260.

[0054] Homologs of the genes providing DNA demonstrated as useful in improving traits in model plants disclosed herein will generally demonstrate significant identity with the DNA provided herein. DNA is substantially identical to a reference DNA if, when the sequences of the polynucleotides are optimally aligned there is about 60% nucleotide equivalence; more preferably 70%; more preferably 80% equivalence; more preferably 85% equivalence; more preferably 90%; more preferably 95%; and/or more preferably 98% or 99% equivalence over a comparison window. A comparison window is preferably at least 50-100 nucleotides, and more preferably is the entire length of the polynucleotide provided herein. Optimal alignment of sequences for aligning a comparison window may be conducted by algorithms; preferably by computerized implementations of these algorithms (for example, the Wisconsin Genetics Software Package Release 7.0-10.0, Genetics Computer Group, 575 Science Dr., Madison, Wis.). The reference polynucleotide may be a full-length molecule or a portion of a longer molecule. Preferentially, the window of comparison for determining polynucleotide identity of protein encoding sequences is the entire coding region.

Polypeptides and Proteins

[0055] Polypeptides provided by the present invention are entire proteins or at least a sufficient portion of the entire protein to impart the relevant biological activity of the protein. The term “protein” also includes molecules consisting of one or more polypeptide chains. Thus, a protein useful in the present invention may constitute an entire protein having the desired biological activity, or may constitute a portion of an oligomeric protein having multiple polypeptide chains. Proteins useful for generation of transgenic plants having improved traits include the proteins with an amino acid sequence provided herein as SEQ ID NO: 5 and 6, as well as homologs of such proteins.

[0056] Homologs of the proteins useful in the present invention may be identified by comparison of the amino acid sequence of the protein to amino acid sequences of proteins from the same or different plant sources, e.g. manually or by using known homology-based search algorithms such as those commonly known and referred to as BLAST, FASTA, and Smith-Waterman. As used herein, a homolog is a protein from the same or a different organism that performs the same biological function as the polypeptide to which it is compared. An orthologous relation between two organisms is not necessarily manifest as a one-to-one correspondence between two genes, because a gene can be duplicated or deleted after organism phylogenetic separation, such as speciation. For a given protein, there may be no ortholog or more than one ortholog. Other complicating factors include alternatively spliced transcripts from the same gene, limited gene identification, redundant copies of the same gene with different sequence lengths or corrected sequence. A local sequence alignment program, e.g. BLAST, can be used to search a database of sequences to find similar sequences, and the summary Expectation value (E-value) used to measure the sequence base similarity. As a protein hit with the best E-value for a particular organism may not necessarily be an ortholog or the only ortholog, a reciprocal BLAST search is used in the present invention to filter hit sequences with significant E-values for ortholog identification. The reciprocal BLAST entails search of the significant hits against a database of amino acid sequences from the base organism that are similar to the sequence of the query protein. A hit is a likely ortholog, when the reciprocal BLAST's best hit is the query protein itself or a protein encoded by a duplicated gene after speciation. Thus, homolog is used herein to described proteins that are assumed to have functional similarity by inference from sequence base similarity.

[0057] A further aspect of the invention comprises functional homolog proteins which differ in one or more amino acids from those of a trait-improving protein disclosed herein as the result of one or more of the well-known conservative amino acid substitutions, e.g. valine is a conservative substitute for alanine and threonine is a conservative substitute for serine. Conservative substitutions for an amino acid within the native sequence can be selected from other members of a class to which the naturally occurring amino acid belongs. Representative amino acids within these various classes include, but are not limited to: (1) acidic (negatively charged) amino acids such as aspartic acid and glutamic acid; (2) basic (positively charged) amino acids such as arginine, histidine, and lysine; (3) neutral polar amino acids such as glycine, serine, threonine, cysteine, tyrosine, asparagine, and glutamine; and (4) neutral nonpolar (hydrophobic) amino acids such as alanine, leucine, isoleucine, valine, proline, phenylalanine, tryptophan, and methionine. Conserved substitutes for an amino acid within a native amino acid sequence can be selected from other members of the group to which the naturally occurring amino acid belongs. For example, a group of amino acids having aliphatic side chains is glycine, alanine, valine, leucine, and isoleucine; a group of amino acids having aliphatic-hydroxyl side chains is serine and threonine; a group of amino acids having amide-containing side chains is asparagine and glutamine; a group of amino acids having aromatic side chains is phenylalanine, tyrosine, and tryptophan; a group of amino acids having basic side chains is lysine, arginine, and histidine; and a group of amino acids having sulfur-containing side chains is cysteine and methionine. Naturally conservative amino acids substitution groups are: valine-leucine, valine-isoleucine, phenylalanine-tyrosine, lysine-arginine, alanine-valine, aspartic acid-glutamic acid, and asparagine-glutamine. A further aspect of the invention comprises proteins that differ in one or more amino acids from those of a described protein sequence as the result of deletion or insertion of one or more amino acids in a native sequence.

[0058] Homologs disclosed provided herein will generally demonstrate significant sequence identity. Of particular interest are proteins having at least 50% sequence identity, more preferably at least about 70% sequence identity or higher, e.g. at least about 80% sequence identity with an amino acid sequence of SEQ ID NO: 5 or 6. Of course useful proteins also include those with higher identity, e.g. 90% to 99% identity. Identity of protein homologs is determined by optimally aligning the amino acid sequence of a putative protein homolog with a defined amino acid sequence and by calculating the percentage of identical and conservatively substituted amino acids over the window of comparison. The window of comparison for determining identity can be the entire amino acid sequence disclosed herein, e.g. the full sequence of any of SEQ ID NO: 5 and 6.

[0059] Genes that are homologous to each other can be grouped into families and included in multiple sequence alignments. Then a consensus sequence for each group can be derived. This analysis enables the derivation of conserved and class-(family) specific residues or motifs that are functionally important. These conserved residues and motifs can be further validated with 3D protein structure if available. The consensus sequence can be used to define the full scope of the invention, e.g. to identify proteins with a homolog relationship.

Promoters

[0060] The promoter that causes expression of an RNA that is operably linked to the polynucleotide molecule in a construct usually controls expression pattern of translated polypeptide in a plant. Promoters for practicing the invention may be obtained from various sources including, but not limited to, plants and plant viruses. Several promoters, including constitutive promoters, inducible promoters and tissue-specific promoters, tissue enhanced promoters that are active in plant cells have been described in the literature. It is preferred that the particular promoter selected should be capable of causing sufficient expression to result in the production of an effective amount of a polypeptide to cause the desired phenotype. “Gene overexpression” used herein in reference to a polynucleotide or polypeptide indicates that the expression level of a target protein, in a transgenic plant or in a host cell of the transgenic plant, exceeds levels of expression in a non-transgenic plant. In a preferred embodiment of the present invention, a recombinant DNA construct comprises the polynucleotide of interest in the sense orientation relative to the promoter to achieve gene overexpression.

[0061] In accordance with the current invention, constitutive promoters are active under most environmental conditions and states of development or cell differentiation. These promoters are likely to provide expression of the polynucleotide sequence at many stages of plant development and in a majority of tissues. A variety of constitutive promoters are known in the art. Examples of constitutive promoters that are active in plant cells include but are not limited to the nopaline synthase (NOS) promoters; the cauliflower mosaic virus (CaMV) 19S and 35S promoters (U.S. Pat. No. 5,858,642, specifically incorporated herein by reference in its entirety); the figwort mosaic virus promoter (P-FMV, U.S. Pat. No. 6,051,753, specifically incorporated herein by reference in its entirety); actin promoters, such as the rice actin promoter (P-Os.Act1, U.S. Pat. No. 5,641,876, specifically incorporated herein by reference in its entirety).

[0062] Furthermore, the promoters may be altered to contain one or more “enhancer sequences” to assist in elevating gene expression. Such enhancers are known in the art. By including an enhancer sequence with such constructs, the expression of the selected protein may be enhanced. These enhancers often are found 5′ to the start of transcription in a promoter that functions in eukaryotic cells, but can often be inserted in the forward or reverse orientation 5′ or 3′ to the coding sequence. In some instances, these 5′ enhancing elements are introns. Deemed to be particularly useful as enhancers are the 5′ introns of the rice actin 1 and rice actin 2 genes. Examples of other enhancers that can be used in accordance with the invention include elements from the CaMV 35S promoter, octopine synthase genes, the maize alcohol dehydrogenase gene, the maize shrunken 1 gene and promoters from non-plant eukaryotes.

[0063] Tissue-preferred promoters cause transcription or enhanced transcription of a polynucleotide sequence in specific cells or tissues at specific times during plant development, such as in vegetative or reproductive tissues. Examples of tissue-preferred promoters under developmental control include promoters that initiate transcription primarily in certain tissues, such as vegetative tissues, e.g., roots, leaves or stems, or reproductive tissues, such as fruit, ovules, seeds, pollen, pistils, flowers, or any embryonic tissue, or any combination thereof. Reproductive tissue preferred promoters may be, e.g., ovule-preferred, embryo-preferred, endosperm-preferred, integument-preferred, pollen-preferred, petal-preferred, sepal-preferred, or some combination thereof. Tissue preferred promoter(s) will also include promoters that can cause transcription, or enhanced transcription in a desired plant tissue at a desired plant developmental stage. An example of such a promoter includes, but is not limited to, a seedling or an early seedling preferred promoter. One skilled in the art will recognize that a tissue-preferred promoter may drive expression of operably linked polynucleotide molecules in tissues other than the target tissue. Thus, as used herein, a tissue-preferred promoter is one that drives expression preferentially not only in the target tissue, but may also lead to some expression in other tissues as well.

[0064] In one embodiment of this invention, preferential expression in plant green tissues is desired. Promoters of interest for such uses include those from genes such as maize aldolase gene FDA (U.S. patent application publication No. 20040216189, specifically incorporated herein by reference in its entirety), aldolase and pyruvate orthophosphate dikinase (PPDK) (Taniguchi et al. (2000) Plant Cell Physiol. 41(1):42-48).

[0065] In another embodiment of this invention, preferential expression in plant root tissue is desired. Exemplary promoter of interest for such uses is derived from Corn Nicotianamine Synthase gene (U.S. patent application publication No. 20030131377, specifically incorporated herein by reference in its entirety) and rice RCC3 promoter (U.S. patent application Ser. No. 11/075,113, specifically incorporated herein by reference in its entirety).

[0066] In yet another embodiment of this invention, preferential expression in plant phloem tissue is desired. An exemplary promoter of interest for such use is the rice tungro bacilliform virus (RTBV) promoter (U.S. Pat. No. 5,824,857, specifically incorporated herein by reference in its entirety).

[0067] In practicing the present invention, an inducible promoter may also be used to ectopically express the structural gene in the recombinant DNA construct. The inducible promoter may cause conditional expression of a polynucleotide sequence under the influence of changing environmental conditions or developmental conditions. For example, such promoters may cause expression of the polynucleotide sequence at certain temperatures or temperature ranges, or in specific stage(s) of plant development such as in early germination or late maturation stage(s) of a plant. Examples of inducible promoters include, but are not limited to, the light-inducible promoter from the small subunit of ribulose-1,5-bis-phosphate carboxylase (ssRUBISCO); the drought-inducible promoter of maize (Busk et al., Plant J. 11: 1285-1295, 1997), the cold, drought, and high salt inducible promoter from potato (Kirch, Plant Mol. Biol. 33:897-909, 1997), and many cold inducible promoters known in the art; for example rd29a and cor15a promoters from Arabidopsis (Genbank ID: D13044 and U01377), blt101 and blt4.8 from barley (Genbank ID: AJ310994 and U63993), wcs120 from wheat (Genbank ID:AF031235), mlip15 from corn (Genbank ID: D26563) and bn115 from Brassica (Genbank ID: U01377).

Plant Transformation

[0068] Various methods for the introduction of a heterologous flavohemoglobin gene encoding, provided by the present invention, into plant cells are available and known to those of skill in the art and include, but are not limited to: (1) physical methods such as microinjection (Capecchi, Cell, 22(2):479-488, 1980), electroporation (Fromm et al., Proc. Natl. Acad. Sci. USA, 82(17):5824-5828, 1985; U.S. Pat. No. 5,384,253) and microprojectile mediated delivery (biolistics or gene gun technology) (Christou et al., Bio/Technology 9:957, 1991; Fynan et al, Proc. Natl. Acad. Sci. USA, 90(24):11478-11482, 1993); (2) virus mediated delivery methods (Clapp, Clin. Perinatol., 20(1):155-168, 1993; Lu et al., J. Exp. Med., 178(6):2089-2096, 1993; Eglitis and Anderson, Biotechniques, 6(7):608-614, 1988; and (3) Agrobacterium-mediated transformation methods.

[0069] The most commonly used methods for transformation of plant cells are the Agrobacterium-mediated DNA transfer process (Fraley et al., Proc. Natl. Acad. Sci. U.S.A., 80: 4803, 1983) and the biolistics or microprojectile bombardment mediated process (i.e. the gene gun). Typically, nuclear transformation is desired but where it is desirable to specifically transform plastids, such as chloroplasts or amyloplasts, plant plastids may be transformed utilizing a microprojectile mediated delivery of the desired polynucleotide for certain plant species such as tobacco, Arabidopsis, potato and Brassica species.

[0070] Agrobacterium-mediated transformation is achieved through the use of a genetically engineered soil bacterium belonging to the genus Agrobacterium. A disarmed Agrobacterium strain C58 (ABI) harboring a DNA construct can be used for all the experiments. According to this method, the construct is transferred into Agrobacterium by a triparental mating method (Ditta et al., Proc. Natl. Acad. Sci. 77:7347-7351). Liquid cultures of Agrobacterium are initiated from glycerol stocks or from a freshly streaked plate and grown overnight at 26° C.-28° C. with shaking (approximately 150 rpm) to mid-log growth phase in liquid LB medium, pH 7.0 containing 50 mg/l kanamycin, 50 mg/l streptomycin and spectinomycin and 25 mg/l chloramphenicol with 200 μM acetosyringone (AS). The Agrobacterium cells are resuspended in the inoculation medium (liquid CM4C) and the density is adjusted to OD₆₆₀ of 1. Freshly isolated Type II immature HiIIxLH198 and Hill corn embryos are inoculated with Agrobacterium containing a DNA construct of the present invention and co-cultured 2-3 days in the dark at 23° C. The embryos are then transferred to delay media (N6 1-100-12/micro/Carb 500/20 μM AgNO3) and incubated at 28° C. for 4 to 5 days. All subsequent cultures are kept at this temperature. Coleoptiles are removed one week after inoculation. The embryos are transferred to the first selection medium (N61-O-12/Carb 500/0.5 mM glyphosate). Two weeks later, surviving tissues are transferred to the second selection medium (N61-O-12/Carb 500/1.0 mM glyphosate). Surviving callus is sub cultured every 2 weeks until events can be identified. This usually takes 3 subcultures on a desired selection media. Once events are identified, tissue is bulked up for regeneration. For regeneration, callus tissues are transferred to the regeneration medium (MSOD, 0.1 μM ABA) and incubated for two weeks. The regenerating calli are transferred to a high sucrose medium and incubated for two weeks. The plantlets are transferred to MSOD media in a culture vessel and kept for two weeks. Then the plants with roots are transferred into soil. After identifying appropriated transformed plants, plants can be grown to produce desired quantities of seeds of the inventions.

[0071] With respect to microprojectile bombardment (U.S. Pat. No. 5,550,318; U.S. Pat. No. 5,538,880; U.S. Pat. No. 5,610,042; and PCT Publication WO 95/06128; each of which is specifically incorporated herein by reference in its entirety), particles are coated with nucleic acids and delivered into cells by a propelling force. An illustrative embodiment of a method for delivering DNA into plant cells by acceleration is the Biolistics Particle Delivery System (BioRad, Hercules, Calif.), which can be used to propel particles coated with DNA or cells through a screen, such as a stainless steel or Nytex screen, onto a filter surface covered with monocot plant cells cultured in suspension. The screen disperses the particles so that they are not delivered to the recipient cells in large aggregates.

[0072] Microprojectile bombardment techniques are widely applicable, and may be used to transform virtually any plant species. Examples of species that have been transformed by microprojectile bombardment include monocot species such as maize (PCT Publication WO 95/06128), barley (Ritala et al., 1994; Hensgens et al., 1993), wheat (U.S. Pat. No. 5,563,055, specifically incorporated herein by reference in its entirety), rice (Hensgens et al., 1993), oat (Torbet et al., 1995; Torbet et al., 1998), rye (Hensgens et al., 1993), sugarcane (Bower et al., 1992), and sorghum (Casa et al., 1993; Hagio et al., 1991); as well as a number of dicots including tobacco (Tomes et al., 1990; Buising and Benbow, 1994), soybean (U.S. Pat. No. 5,322,783, specifically incorporated herein by reference in its entirety), sunflower (Knittel et al. 1994), peanut (Singsit et al., 1997), cotton (McCabe and Martinell, 1993), tomato (Van Eck et al. 1995), and legumes in general (U.S. Pat. No. 5,563,055, specifically incorporated herein by reference in its entirety).

[0073] For microprojectile bombardment transformation in accordance with the current invention, both physical and biological parameters may be optimized. Physical factors are those that involve manipulating the DNA/microprojectile precipitate or those that affect the flight and velocity of either the macro- or microprojectiles. Biological factors include all steps involved in manipulation of cells before and immediately after bombardment, such as the osmotic adjustment of target cells to help alleviate the trauma associated with bombardment, the orientation of an immature embryo or other target tissue relative to the particle trajectory, and also the nature of the transforming DNA, such as linearized DNA or intact supercoiled plasmids. It is believed that pre-bombardment manipulations are especially important for successful transformation of immature embryos.

[0074] Accordingly, it is contemplated that one may wish to adjust various of the bombardment parameters in small scale studies to fully optimize the conditions. One may particularly wish to adjust physical parameters such as DNA concentration, gap distance, flight distance, tissue distance, and helium pressure. It further is contemplated that the grade of helium may effect transformation efficiency. One also may optimize the trauma reduction factors (TRFs) by modifying conditions which influence the physiological state of the recipient cells and which may therefore influence transformation and integration efficiencies. For example, the osmotic state, tissue hydration and the subculture stage or cell cycle of the recipient cells may be adjusted for optimum transformation.

[0075] To select or score for transformed plant cells regardless of transformation methodology, the DNA introduced into the cell contains a gene that functions in a regenerable plant tissue to produce a compound that confers upon the plant tissue resistance to an otherwise toxic compound. Genes of interest for use as a selectable, screenable, or scorable marker will include but are not limited to GUS, green fluorescent protein (GFP), luciferase (LUX), antibiotic or herbicide tolerance genes. Examples of antibiotic resistance genes include the penicillins, kanamycin (and neomycin, G418, bleomycin); methotrexate (and trimethoprim); chloramphenicol; kanamycin and tetracycline.

[0076] Particularly preferred selectable marker genes for use in the present invention will include genes that confer resistance to compounds such as antibiotics like kanamycin (nptII), hygromycin B (aph IV) and gentamycin (aac3 and aacC4) (Dekeyser et al., Plant Physiol., 90:217-223, 1989), and herbicides like glyphosate (Della-Cioppa et al., Bio/Technology, 5:579-584, 1987). Other selection devices can also be implemented including but not limited to tolerance to phosphinothricin, bialaphos, and positive selection mechanisms (Joersbo et al., Mol. Breed., 4:111-117, 1998) and are considered within the scope of the present invention. The regeneration, development, and cultivation of plants from various transformed explants are well documented in the art. This regeneration and growth process typically includes the steps of selecting transformed cells and culturing those individualized cells through the usual stages of embryonic development through the rooted plantlet stage. Transgenic embryos and seeds are similarly regenerated. The resulting transgenic rooted shoots are thereafter planted in an appropriate plant growth medium such as soil. Cells that survive the exposure to the selective agent, or cells that have been scored positive in a screening assay, may be cultured in media that supports regeneration of plants. In an embodiment, MS and N6 media may be modified by including further substances such as growth regulators. A preferred growth regulator for such purposes is dicamba or 2,4-D. However, other growth regulators may be employed, including NAA, NAA+2,4-D or perhaps even picloram. Media improvement in these and like ways has been found to facilitate the growth of cells at specific developmental stages. Tissue may be maintained on a basic media with growth regulators until sufficient tissue is available to begin plant regeneration efforts, or following repeated rounds of manual selection, until the morphology of the tissue is suitable for regeneration, at least 2 weeks, then transferred to media conducive to maturation of embryoids. Cultures are transferred every 2 weeks on this medium. Shoot development will signal the time to transfer to medium lacking growth regulators.

[0077] The transformed cells, identified by selection or screening and cultured in an appropriate medium that supports regeneration, will then be allowed to mature into plants. Developing plantlets are transferred to soilless plant growth mix, and hardened off, e.g., in an environmentally controlled chamber at about 85% relative humidity, 600 ppm CO₂, and 25-250 microeinsteins m⁻² s⁻¹ of light, prior to transfer to a greenhouse or growth chamber for maturation. Plants are preferably matured either in a growth chamber or greenhouse. Plants are regenerated from about 6 wk to 10 months after a transformant is identified, depending on the initial tissue. During regeneration, cells are grown on solid media in tissue culture vessels. Illustrative embodiments of such vessels are petri dishes and Plant Cons. Regenerating plants are preferably grown at about 19 to 28° C. After the regenerating plants have reached the stage of shoot and root development, they may be transferred to a greenhouse for further growth and testing.

[0078] Note, however, that seeds on transformed plants may occasionally require embryo rescue due to cessation of seed development and premature senescence of plants. To rescue developing embryos, they are excised from surface-disinfected seeds 10-20 days post-pollination and cultured. An embodiment of media used for culture at this stage comprises MS salts, 2% sucrose, and 5.5 g/l agarose. In embryo rescue, large embryos (defined as greater than 3 mm in length) are germinated directly on an appropriate media. Embryos smaller than that may be cultured for 1 wk on media containing the above ingredients along with 10⁻⁵M abscisic acid and then transferred to growth regulator-free medium for germination.

[0079] The present invention can be used with any transformable cell or tissue. By transformable as used herein is meant a cell or tissue that is capable of further propagation to give rise to a plant. Those of skill in the art recognize that a number of plant cells or tissues are transformable in which after insertion of exogenous DNA and appropriate culture conditions the plant cells or tissues can form into a differentiated plant. Tissue suitable for these purposes can include but is not limited to immature embryos, scutellar tissue, suspension cell cultures, immature inflorescence, shoot meristem, nodal explants, callus tissue, hypocotyl tissue, cotyledons, roots, and leaves.

[0080] Any suitable plant culture medium can be used. Examples of suitable media will include but are not limited to MS-based media (Murashige and Skoog, Physiol. Plant, 15:473-497, 1962) or N6-based media (Chu et al., Scientia Sinica 18:659, 1975) supplemented with additional plant growth regulators including but not limited to auxins such as picloram (4-amino-3,5,6-trichloropicolinic acid), 2,4-D (2,4-dichlorophenoxyacetic acid) and dicamba (3,6-dichloroanisic acid); cytokinins such as BAP (6-benzylaminopurine) and kinetin; ABA; and gibberellins. Other media additives can include but are not limited to amino acids, macroelements, iron, microelements, vitamins and organics, carbohydrates, undefined media components such as casein hydrolysates, with or without an appropriate gelling agent such as a form of agar, such as a low melting point agarose or Gelrite if desired. Those of skill in the art are familiar with the variety of tissue culture media, which when supplemented appropriately, support plant tissue growth and development and are suitable for plant transformation and regeneration. These tissue culture media can either be purchased as a commercial preparation, or custom prepared and modified. Examples of such media will include but are not limited to Murashige and Skoog (Murashige and Skoog, Physiol. Plant, 15:473-497, 1962), N6 (Chu et al., Scientia Sinica 18:659, 1975), Linsmaier and Skoog (Linsmaier and Skoog, Physio. Plant., 18: 100, 1965), Uchimiya and Murashige (Uchimiya and Murashige, Plant Physiol. 15:473, 1962), Gamborg's B5 media (Gamborg et al., Exp. Cell Res., 50:151, 1968), D medium (Duncan et al., Planta, 165:322-332, 1985), McCown's Woody plant media (McCown and Lloyd, HortScience 16:453, 1981), Nitsch and Nitsch (Nitsch and Nitsch, Science 163:85-87, 1969), and Schenk and Hildebrandt (Schenk and Hildebrandt, Can. J. Bot. 50:199-204, 1972) or derivations of these media supplemented accordingly. Those of skill in the art are aware that media and media supplements such as nutrients and growth regulators for use in transformation and regeneration and other culture conditions such as light intensity during incubation, pH, and incubation temperatures that can be optimized for the particular variety of interest.

Transgenic Plants Expressing a Heterologous Flavohemoglobin Protein have Improved Agronomic Trait(s)

[0081] In one embodiment of the present invention, transgenic plants expressing E. coli HMP, have been generated and have been shown to contain a higher level of chlorophyll content, under a limiting nitrogen growth condition, as compared to control plants. The higher level of chlorophyll content is a characteristics of more robust growth. In another aspect, according to the present invention, the transgenic plants expressing E. coli HMP also exhibit more robust growth under a sufficient nitrogen growth condition, shown as increased shoot fresh mass. In yet another aspect, according to the present invention, expressing E. coli HMP in corn plants significantly reduces the level of NO in leaf tissues. In still another aspect, according to the present invention, transgenic corn plants expressing E. coli HMP also have shown to have increased seed yield under field conditions.

[0082] In another embodiment of the present invention, transgenic corn plants expressing yeast YHB1 also have been generated and have been shown to have an increased yield.

[0083] As illustrated in FIG. 1, in accordance to the present invention, we contemplate that, under the limiting nitrogen growth condition, the presence of flavohemoglobin may enhance plant growth by increasing available nitrate, whereas, under the sufficient nitrogen growth condition or limiting nitrogen condition, the presence of flavohemoglobin may enhance plant growth by reducing toxic effect of NO.

[0084] Also in accordance of the present invention, transgenic plants expressing a heterologous flavohemoglobin having an amino acid sequence selected from the group consisting of SEQ ID NO: 130 through SEQ ID NO: 256, which are identified as the homologs of the E. coli HMP protein by the present invention.

[0085] Plants of the present invention include, but not limited to, Acacia, alfalfa, aneth, apple, apricot, artichoke, arugula, asparagus, avocado, banana, barley, beans, beet, blackberry, blueberry, broccoli, brussels sprouts, cabbage, canola, cantaloupe, carrot, cassaya, cauliflower, celery, cherry, cilantro, citrus, clementine, coffee, corn, cotton, cucumber, Douglas fir, eggplant, endive, escarole, eucalyptus, fennel, figs, forest trees, gourd, grape, grapefruit, honey dew, jicama, kiwifruit, lettuce, leeks, lemon, lime, loblolly pine, mango, melon, mushroom, nut, oat, okra, onion, orange, an ornamental plant, papaya, parsley, pea, peach, peanut, pear, pepper, persimmon, pine, pineapple, plantain, plum, pomegranate, poplar, potato, pumpkin, quince, radiata pine, radicchio, radish, rapeseed, raspberry, rice, rye, sorghum, Southern pine, soybean, spinach, squash, strawberry, sugarbeet, sugarcane, sunflower, sweet potato, sweetgum, tangerine, tea, tobacco, tomato, turf, a vine, watermelon, wheat, yams, and zucchini. Crop plants are defined as plants, which are cultivated to produce one or more commercial product. Examples of such crops or crop plants include but are not limited to soybean, canola, rape, cotton (cottonseeds), sunflower, and grains such as corn, wheat, rice, and rye. Rape, rapeseed or canola is used synonymously in the present disclosure.

[0086] The transgenic plants of the present invention may be productively cultivated under limiting nitrogen growth conditions (i.e., nitrogen-poor soils and low nitrogen fertilizer inputs) that would cause the growth of wild-type plants to cease, to be so diminished as to make the wild-type plants practically useless, or cause a significant yield reduction of wild-type plants. The transgenic plants also may be advantageously used to achieve earlier maturing, faster growing, and/or higher yielding crops and/or produce more nutritious foods and animal feedstocks when cultivated using sufficient nitrogen growth conditions (i.e., soils or media containing or receiving sufficient amounts of nitrogen nutrients to sustain healthy plant growth). In another aspect, transgenic plants with increased nitrogen use efficiency provided by the present invention will have environmental benefits in general, such as reducing the amount of nitrate leashed from soil and into ground water.

[0087] The following examples are provided to better elucidate the practice of the present invention and should not be interpreted in any way to limit the scope of the present invention. Those skilled in the art will recognize that various modifications, additions, substitutions, truncations, etc., can be made to the methods and genes described herein while not departing from the spirit and scope of the present invention.

### EXAMPLES

### Example 1

### Construct for Plant Transformation

A. Corn Transformation Constructs

[0088] GATEWAY™ destination vectors (available from Invitrogen Life Technologies, Carlsbad, Calif.) can be constructed for each DNA molecule disclosed herein for corn transformation. The elements of each destination vector are summarized in Table 2 below and include a selectable marker transcription region and a DNA insertion transcription region. The selectable marker transcription region comprises a Cauliflower Mosaic Virus 35S promoter operably linked to a gene encoding neomycin phosphotransferase II (nptII) followed by both the 3′ region of the Agrobacterium tumefaciens nopaline synthase gene (nos) and the 3′ region of the potato proteinase inhibitor II (pinII) gene. The DNA insertion transcription region comprises a rice actin 1 promoter, a rice actin 1 exon 1 intron1 enhancer, an att-flanked insertion site and the 3′ region of the potato pinII gene. Following standard procedures provided by Invitrogen the att-flanked insertion region is replaced by recombination with trait-improving DNA, in a sense orientation for expression of a flavohemoglobin protein. Although the vector with the flavohemoglobin gene disclosed herein inserted at the att-flanked insertion region is useful for plant transformation by direct DNA delivery, such as microprojectile bombardment, it is preferable to bombard target plant tissue with tandem transcription units that have been cut from the vector.

TABLE 2
Elements of an exemplary corn transformation vector

| FUNCTION | ELEMENT | REFERENCE |
|---|---|---|
| DNA insertion | Rice actin 1 promoter | U.S. Pat. No. 5,641,876 |
| transcription region | Rice actin_1_exon_1_intron_1 | U.S. Pat. No. 5,641,876 |
| | enhancer | |
| DNA insertion | AttR1 | GATEWAY ™ Cloning Technology |
| transcription region | | Instruction Manual |
| (att - flanked insertin | CmR gene | GATEWAY ™ Cloning Technology |
| region) | | Instruction Manual |
| | ccdA, ccdB genes | GATEWAY ™ Cloning Technology |
| | | Instruction Manual |
| | attR2 | GATEWAY ™ Cloning Technology |
| | | Instruction Manual |
| DNA insertion | Potato pinII 3′ region | An, et al., (1989) Plant Cell 1: 115-122 |
| transcription region | | |
| selectable marker | CaMV 35S promoter | U.S. Pat. No. 5,858,742 |
| transcription region | nptII selectable marker | U.S. Pat. No. 5,858,742 |
| | nos 3region | U.S. Pat. No. 5,858,742 |
| | PinII 3′ region | An, et al., (1989) Plant Cell 1: 115-122 |
| E. coli maintenance | ColE1 origin of | / |
| region | replication | |
| | F1 origin of replication | / |
| | Bla ampicillin resistance | / |

[0089] Exemplary such corn transformation constructs made by the present invention include pMON69471 comprising SEQ NO:3 as shown in FIG. 2, pMON67827 comprising SEQ NO: 4 as shown in FIG. 3.

[0090] For Agrobacterium-mediated transformation of plants the vector also comprises T-DNA borders from Agrobacterium flanking the transcription units. Elements of an exemplary expression vector, pMON95605, are illustrated in FIG. 4 and Table 3. Elements of another exemplary expression vector, pMON99286, are illustrated in FIG. 5 and Table 4. Yet elements of another exemplary expression vector, pMON99261, are illustrated in FIG. 6 and Table 5. Yet elements of another exemplary expression vector, pMON99276, are illustrated in FIG. 7 and Table 6. Yet elements of another exemplary expression vector, pMON94446, are illustrated in FIG. 8 and Table 7. Elements of another exemplary expression vector, pMON102760, are illustrated in FIG. 9 and Table 8. These corn transformation constructs were assembled using the technology known in the art.

TABLE 3
Annotation of element names used in plasmid map of pMON96505

| Element name in figures | Annotation |
|---|---|
| CR-AGRtu.aroA-CP4.nat | Coding region for native bacterial strain CP4 |
| | aroA gene, encoding class II EPSPS |
| | enzyme |
| CR-Ec.aadA-SPC/STR | Coding region for Tn7 adenylyltransferase |
| | (AAD(3″)) conferring spectinomycin and |
| | streptomycin resistance |
| CR-Ec.bla | The coding sequence for beta-lactamase |
| | derived |
| CR-Ec.nptII-Tn5 | coding region for nptII from E. coli |
| CR-Ec.rop | Coding region for repressor of primer from the |
| | ColE1 plasmid. Also known as rom. |
| | Expression of this gene product |
| | interferes with primer binding at the |
| | origin of replication, keeping |
| | plasmid copy number low. |
| IG-St.Pis4 | Intergenic region of the potato proteinase |
| | inhibitor II gene |
| I-Os-Act1 | First intron and flanking UTR exon sequences |
| | from the rice actin 1 gene |
| L-Os.Act1 | Leader (first exon) from the rice actin 1 gene |
| OR-Ec.ori-ColE1 | Minimal origin of replication from the |
| | Escherichia coli plasmid, ColE1 |
| OR-Ec.oriV-RK2 | Vegetative origin of replication used by |
| | Agrobacterium tumefaciens |
| P-CaMv.35S | promoter and 5′ UTR for the CaMV 35S RNA |
| P-Ec.aadA-SPC/STR | promoter of aadA for spectinomycin and |
| | streptomycin resistance gene expression |
| p-Os.Act1 | Promoter from the rice actin gene |
| T-AGRtu.nos | transcription termination sequence of from |
| | nopaline synthase gene from Agrobacterium |
| T-Ec.aadA-SPC/STR | terminator of aadA for spectinomycin and |
| | streptomycin resistance gene expression |
| TS-At.ShkG-CTP2 | Transit peptide from Arabidopsis EPSPS-CTP2 |
| | gene |
| T-St.Pis4 | The 3′ non-translated region of the potato |
| | proteinase inhibitor II gene which functions to |
| | direct polyadenylation of the mRNA |
| B-AGRtu.left border | Left border sequence for T-DNA transfer |
| B-AGRtu.right border | right border sequence for T-DNA transfer |

[0091] TABLE 4
Annotation of element names used in plasmid map of pMON99286

| Element Name | Coordinates | Annotation |
|---|---|---|
| T-St.Pis4 | 19-961 | The 3′ non-translated region of the potato |
| | | proteinase inhibitor II gene which functions |
| | | to direct polyadenylation of the mRNA |
| P-Os.Act1 | 977-1817 | Promoter from the rice actin 1 gene |
| L-Os.Act1 | 1818-1897 | Leader (first exon) from the rice actin 1 gene |
| I-Os.Act1 | 1898-2375 | First intron and flanking UTR exon |
| | | sequences from the rice actin 1 gene |
| TS-At.ShkG-CTP2 | 2385-2612 | Transit peptide from Arabidopsis EPSPS- |
| | | CTP2 gene |
| CR-AGRtu.aroA- | 2613-3980 | Coding region for native bacterial strain CP4 |
| CP4.nat | | aroA gene, encoding class II EPSPS enzyme |
| T-AGRtu.nos | 3996-4248 | transcription termination sequence of from |
| | | nopaline synthase gene from Agrobacterium |
| B-AGRtu.left border | 4377-4818 | Left border sequence for T-DNA transfer |
| OR-Ec.oriV-RK2 | 4875-5271 | Vegetative origin of replication used by |
| | | Agrobacterium tumefaciens |
| CR-Ec.rop | 6780-6971 | Coding region for repressor of primer from |
| | | the ColE1 plasmid. Also known as rom. |
| | | Expression of this gene product interferes |
| | | with primer binding at the origin of |
| | | replication, keeping plasmid copy number |
| | | low. |
| OR-Ec.ori-ColE1 | 7399-7987 | Minimal origin of replication from the |
| | | Escherichia coli plasmid, ColE1 |
| P-Ec.aadA-SPC/STR | 8518-8559 | promoter of aadA for spectinomycin and |
| | | streptomycin resistance gene expression |
| CR-Ec.aadA-SPC/STR | 8560-9348 | Coding region for Tn7 adenylyltransferase |
| | | (AAD(3″)) conferring spectinomycin and |
| | | streptomycin resistance |
| T-Ec.aadA-SPC/STR | 9349-9406 | terminator of aadA for spectinomycin and |
| | | streptomycin resistance gene expression |
| B-AGRtu.right border | 9543-9899 | Right border sequence for T-DNA transfer |
| P-RTBV | 9925-10650 | Promoter from rice tungro bacilliform virus. |
| L-RTBV | 10651-10690 | 5′ untranslated region from the rice tungro |
| | | bacilliform virus full length transcript. |
| I-Zm.DnaK | 10711-11514 | Zea mays HSP70 intron with flanking exon |
| | | sequence enhances expression in plants. |
| CR- | 11551-12741 | SEQ ID NO: 1 |
| Ec.PHE0006515_Codon- | | |
| optimized E. coli HMP | | |

[0092] TABLE 5
Annotation of element names used in plasmid map of pMON99261

| Element Name | Coordinates | Annotation |
|---|---|---|
| T-St.Pis4 | 19-961 | The 3′ non-translated region of the potato |
| | | proteinase inhibitor II gene which functions to |
| | | direct polyadenylation of the mRNA |
| P-Os.Act1 | 977-1817 | Promoter from the rice actin 1 gene |
| L-Os.Act1 | 1818-1897 | Leader (first exon) from the rice actin 1 gene |
| I-Os.Act1 | 1898-2375 | First intron and flanking UTR exon sequences |
| | | from the rice actin 1 gene |
| TS-At.ShkG-CTP2 | 2385-2612 | Transit peptide from Arabidopsis EPSPS- |
| | | CTP2 gene |
| CR-AGRtu.aroA-CP4.nat | 2613-3980 | Coding region for native bacterial strain CP4 |
| | | aroA gene, encoding class II EPSPS enzyme |
| T-AGRtu.nos | 3996-4248 | transcription termination sequence of from |
| | | nopaline synthase gene from Agrobacterium |
| B-AGRtu.left border | 4347-4788 | Left border sequence for T-DNA transfer |
| OR-Ec.oriV-RK2 | 4875-5271 | Vegetative origin of replication used by |
| | | Agrobacterium tumefaciens |
| CR-Ec.rop | 6780-6971 | Coding region for repressor of primer from |
| | | the ColE1 plasmid. Also known as rom. |
| | | Expression of this gene product interferes |
| | | with primer binding at the origin of |
| | | replication, keeping plasmid copy number |
| | | low. |
| OR-Ec.ori-ColE1 | 7399-7987 | Minimal origin of replication from the |
| | | Escherichia coli plasmid, ColE1 |
| P-Ec.aadA-SPC/STR | 8518-8559 | promoter of aadA for spectinomycin and |
| | | streptomycin resistance gene expression |
| CR-Ec.aadA-SPC/STR | 8560-9348 | Coding region for Tn7 adenylyltransferase |
| | | (AAD(3″)) conferring spectinomycin and |
| | | streptomycin resistance |
| T-Ec.aadA-SPC/STR | 9349-9406 | terminator of aadA for spectinomycin and |
| | | streptomycin resistance gene expression |
| B-AGRtu.right border | 9543-9899 | Right border sequence for T-DNA transfer |
| E-Zm.FDA | 9922-11036 | enhancer derived from the promoter region of |
| | | corn fructose-bisphosphate aldolase |
| P-Zm.PPDK-1:1:10 | 11078-11863 | Promoter from corn pyruvate orthophosphate |
| | | dikinase gene |
| L-Zm.PPDK | 11864-12028 | 5′ untranslated region from corn pyruvate |
| | | orthophosphate dikinase gene |
| I-Zm.DnaK | 12042-12845 | Zea mays HSP70 intron with flanking exon |
| | | sequence enhances expression in plants |
| CR- | 12882-14072 | SEQ ID NO: 1 |
| Ec.PHE0006515_Codon- | | |
| optimized E.coli HMP | | |

[0093] TABLE 6
Annotation of element names used in plasmid map of pMON99276

| Element Name | Coordinates | Annotation |
|---|---|---|
| T-St.Pis4 | 19-961 | The 3′ non-translated region of the potato |
| | | proteinase inhibitor II gene which functions to |
| | | direct polyadenylation of the mRNA |
| P-Os.Act1 | 1007-1847 | Promoter from the rice actin 1 gene |
| L-Os.Act1 | 1848-1927 | Leader (first exon) from the rice actin 1 gene |
| I-Os.Act1 | 1928-2405 | First intron and flanking UTR exon sequences |
| | | from the rice actin 1 gene |
| TS-At.ShkG-CTP2 | 2415-2642 | Transit peptide from Arabidopsis EPSPS- |
| | | CTP2 gene |
| CR-AGRtu.aroA-CP4.nat | 2643-4010 | Coding region for native bacterial strain CP4 |
| | | aroA gene, encoding class II EPSPS enzyme |
| T-AGRtu.nos | 4026-4278 | transcription termination sequence of from |
| | | nopaline synthase gene from Agrobacterium |
| B-AGRtu.left border | 4377-4818 | Left border sequence for T-DNA transfer |
| OR-Ec.oriV-RK2 | 4905-5301 | Vegetative origin of replication used by |
| | | Agrobacterium tumefaciens |
| CR-Ec.rop | 6810-7001 | Coding region for repressor of primer from |
| | | the ColE1 plasmid. Also known as rom. |
| | | Expression of this gene product interferes |
| | | with primer binding at the origin of |
| | | replication, keeping plasmid copy number |
| | | low. |
| OR-Ec.ori-ColE1 | 7429-8017 | Minimal origin of replicatilon from the |
| | | Escherichia coli plasmid, ColE1 |
| P-Ec.aadA-SPC/STR | 8548-8589 | promoter of aadA for spectiomycin and |
| | | streptomycin resistance gene expression |
| CR-Ec.aadA-SPC/STR | 8590-9378 | Coding region for Tn7 adenylyltransferase |
| | | (AAD(3″)) conferring spectinomycin and |
| | | streptomycin resistance |
| T-Ec.aadA-SPC/STR | 9379-9436 | terminator of aadA for spectinomycin and |
| | | streptomycin resistance gene expression |
| B-AGRtu.right border | 9573-9929 | Right border sequence for T-DNA transfer |
| P-CaMV.35S | 9956-10567 | Promoter for 35S RNA from CaMV |
| | | containing a duplication of the −90 to −350 |
| | | region. |
| L-CaMV.35S | 10568-10576 | 5′ UTR from the 35S RNA of CaMV. |
| I-Zm.DnaK | 10583-11386 | Zea mays HSP70 intron with flanking exon |
| | | sequence enhances expression in plant |
| CR- | 11423-12613 | SEQ ID NO: 1 |
| Ec.PHE0006515_Codon- | | |
| optimized E. coli HMP | | |

[0094] TABLE 7
Annotation of element names used in plasmid map of pMON94446

| Element Name | Coordinates | Annotation |
|---|---|---|
| P-CaMV.35S | 1011-1303 | Promoter for the 35S RNA from CaMV |
| CR-Ec.nptII- | 1368-2175 | Confers resistance to neomycin and kanamycin |
| Tn5 | | |
| T-AGRtu.nos | 2204-2456 | transcription termination sequence of from nopaline |
| | | synthase gene from Agrobacterium |
| IG-St.Pis4 | 2468-3214 | Intergenic region of the potato proteinase inhibitor II |
| | | gene |
| B-AGRtu.left | 3277-3718 | Left border sequence for T-DNA transfer |
| border | | |
| OR-Ec.oriV- | 3805-4201 | Vegetative origin of replication used by |
| RK2 | | Agrobacterium tumefaciens |
| CR-Ec.rop | 5710-5901 | Coding region for repressor of primer from the ColE1 |
| | | plasmid. Also known as rom. Expression of this gene |
| | | product interferes with primer binding at the origin of |
| | | replication, keeping plasmid copy number low. |
| OR-Ec.ori- | 6329-6917 | Minimal origin of replication from the Escherichia coli |
| ColE1 | | plasmid, ColE1 |
| P-Ec.aadA- | 7448-7489 | promoter of aadA for spectinomycin and streptomycin |
| SPC/STR | | resistance gene expression |
| CR-Ec.aadA- | 7490-8278 | Coding region for Tn7 adenylyltransferase (AAD(3”)) |
| SPC/STR | | conferring spectinomycin and streptomycin resistance |
| T-Ec.aadA- | 8279-8336 | terminator of aadA for spectinomycin and |
| SPC/STR | | streptomycin resistance gene expression |
| B-AGRtu.right | 8473-8829 | Right border sequence for T-DNA transfer |
| border | | |
| E-Zm.FDA | 8852-9966 | enhancer derived from the promoter region of corn |
| | | fructose-bisphosphate aldolase. |
| P-Zm.PPDK | 10008-10793 | Promoter from corn pyruvate orthophosphate dikinase |
| | | gene |
| L-Zm.PPDK | 10794-10958 | 5’untranslated region from corn pyruvate |
| | | orthophosphate dikinase gene |
| I-Zm.DnaK | 10972-11775 | Zea mays HSP70 intron with flanking exon sequence |
| | | enhances expression in plants |
| CR-Ec.hmp | 11812-13002 | coding region of E. coli HMP gene |
| T-St.Pis4 | 24-966 | The 3′ non-translated region of the potato proteinase |
| | | inhibitor II gene which functions to direct |
| | | polyadenylation of the mRNA |

[0095] TABLE 8
Annotation of element names used in plasmid map of pMON102760

| Element Name | Coordinates | Annotation |
|---|---|---|
| P-Os.Act1 | 1025-1865 | Promoter from the rice actin 1 gene |
| L-Os.Act1 | 1866-1945 | Leader (first exon) from the rice actin 1 gene |
| I-Os.Act1 | 1946-2423 | First intron and flanking UTR exon sequences |
| | | from the rice actin 1 gene |
| TS-At.ShkG-CTP2 | 2433-2660 | Transit peptide from Arabidopsis EPSPS-CTP2 |
| | | gene |
| CR-AGRtu.aroA- | 2661-4028 | Coding region for native bacterial strain CP4 |
| CP4.nat | | aroA gene, encoding class II EPSPS enzyme |
| T-AGRtu.nos | 4044-4296 | transcription termination sequence of from |
| | | nopaline synthase gene from Agrobacterium |
| B-AGRtu.left border | 4395-4836 | Left border sequence for T-DNA transfer |
| OR-Ec.oriV-RK2 | 4923-5319 | Vegetative origin of replication used by |
| | | Agrobacterium tumefaciens |
| CR-Ec.rop | 6828-7019 | Coding region for repressor of primer from the |
| | | ColE1 plasmid. Also known as rom. |
| | | Expression of this gene product interferes with |
| | | primer binding at the origin of replication, |
| | | keeping plasmid copy number low. |
| OR-Ec.ori-ColE1 | 7447-8035 | Minimal origin of replication from the |
| | | Escherichia coli plasmid, ColE1 |
| P-Ec.aadA-SPC/STR | 8566-8607 | promoter of aadA for spectinomycin and |
| | | streptomycin resistance gene expression |
| CR-Ec.aadA-SPC/STR | 8608-9396 | Coding region for Tn7 adenylyltransferase |
| | | (AAD(3”)) conferring spectinomycin and |
| | | streptomycin resistance |
| T-Ec.aadA-SPC/STR | 9397-9454 | terminator of aadA for spectinomycin and |
| | | streptomycin resistance gene expression |
| B-AGRtu.right border | 9591-9947 | Right border sequence for T-DNA transfer |
| EXP- | 9969-11635 | Promoter and 5′ untranslated region from a rice |
| Os.Rcc3 + Zm.DnaK | | root gene plus the corn hsp70 intron |
| P-Os.Rcc3 | 9969-10726 | / |
| L-Os.Rcc3 | 10727-10825 | / |
| I-Zm.DnaK | 10832-11635 | / |
| CR-Sc.yeast | 11672-12871 | coding region of yeast flabohemoglobin gene |
| flavohemoglobin | | |
| T-St.Pis4 | 37-979 | The 3′ non-translated region of the potato |
| | | proteinase inhibitor II gene which functions to |
| | | direct polyadenylation of the mRNA |

[0096] Constructs for Agrobacterium-mediated transformation are prepared with each of the flavohemoglobin genes with the DNA solely in sense orientation for expression of the cognate flavohemoglobin protein.

[0097] Each construct is transformed into corn callus which is propagated into a plant that is grown to produce transgenic seed. Progeny plants are self-pollinated to produce seed which is selected for homozygous seed. Homozygous seed is used for producing inbred plants, for introgressing the trait into elite lines, and for crossing to make hybrid seed. Transgenic corn including inbred and hybrids are also produced with DNA from each of the identified homologs.

B. Soybean Transformation Construct

[0098] Constructs for use in transformation of soybean may be prepared by restriction enzyme based cloning into a common expression vector. Elements of an exemplary common expression vector are shown in Table 9 below and include a selectable marker expression cassette and a gene of interest expression cassette. The selectable marker expression cassette comprises Arabidopsis act 7 gene (AtAct7) promoter with intron and 5′UTR, the transit peptide of Arabidopsis EPSPS, the synthetic CP4 coding region with dicot preferred codon usage and a 3′ UTR of the nopaline synthase gene. The gene of interest expression cassette comprises a Cauliflower Mosaic Virus 35S promoter operably linked to a trait-improving gene in a sense orientation for expression of a flavohemoglogin.

[0099] Vectors similar to that described above may be constructed for use in Agrobacterium mediated soybean transformation systems, with each of the flavohemoglobin genes selected from the group consisting of SEQ ID NO: 1 though SEQ ID NO: 4, and SEQ ID NO: 7 through SEQ ID NO: 129, and SEQ ID NO: 260 with the DNA in sense orientation for expression of the cognate protein. Transgenic soybean plants expressing a heterologous flavohemoglobin protein are produced. Transgenic soybean plants are also produced with DNA from each of the identified homologs and provide seeds for plants with improved agronomic traits.

TABLE 9
Elements of an exemplary soybean transformation construct

| Function | Element | Reference |
|---|---|---|
| Agro transformation | B-ARGtu.right border | Depicker, A., et al., |
| | | (1982) Mol Appl Genet |
| | | 1: 561-573 |
| Antibiotic resistance | CR-Ec.aadA-SPC/STR | / |
| Repressor of primers from the ColE1 | CR-Ec.rop | / |
| plasmid | | |
| Origin of replication | OR-Ec.oriV-RK2 | / |
| Agro transformation | B-ARGtu.left border | Barker, R. F., et al., (1983) |
| | | Plant Mol Biol 2: 335-350 |
| Plant selectable marker expression | Arabidopsis act 7 gene | McDowell, et al., (1996) |
| cassette | (AtAct7) promoter with | Plant Physiol. 111: 699-711. |
| | intron and 5′UTR | |
| | 5′ UTR of Arabidopsis act 7 | |
| | gene | |
| | Intron in 5′UTR of AtAct7 | |
| | Transit peptide region of | Klee, H. J., et al., (1987) |
| | Arabidopsis EPSPS | MGG 210: 437-442 |
| | Synthetic CP4 coding region | / |
| | with dicot preferred codon | |
| | usage | |
| | A 3′ UTR of the nopaline | U.S. Pat. No. 5,858,742 |
| | synthase gene of | |
| | Agrobacterium tumefaciens | |
| | Ti plasmid | |
| Plant gene of interest expression | Promoter for 35S RNA from | U.S. Pat. No. 5,322,938 |
| cassette | caMV containing a | |
| | duplication of the −90 to −350 | |
| | region | |
| | Gene of interest insertion site | / |
| | Cotton E6 3′ end | GenBank accession |
| | | U30508 |

[0100] Exemplary such soybean transformation constructs made by the present invention include pMON95622 comprising SEQ NO:3 as shown in FIG. 10.

### Example 2

### Characterization of Transgene Expression

[0101] The constructs, pMON69471 was constructed with a sequence derived from the 3′ region of the potato pinII gene, which could be used to assay the relative level of transgene expression. The total RNA was extracted from the tissue lysates by regular methods known in the art and the extracted mRNA was analyzed by Taqman® with probes specific to the potato protease inhibitor (PINII) terminator. Values represent the mean from four individual plants.

[0102] The primers for PINII terminator amplification are the followings: PinII F-4 (forward primer) GATGCACACATAGTGACATGCTAATCAC (SEQ ID NO: 267), PinII Probe 4 ATTACACATAACACACAACTTTGATGCCCACAT (SEQ ID NO: 268), PinII R-4 (reverse primer) GGATGATCTCTTTCTCTTATTCAGATAATTAG (SEQ ID NO: 269). Within each PCR reaction, a standard RNA 18S rRNA amplification was used as an internal control. The primers for 18S rRNA amplification are the followings: the forward primer CGTCCCTGCCCTTTGTACAC (SEQ ID NO: 270), the reverse primer CGAACACTTCACCGGATCATT (SEQ ID NO: 271) and the internal primer vic-CCGCCCGTCGCTCCTACCGAT-tamra (SEQ ID NO: 272). The RT-PCR conditions were 48° C. for 30 min, 95° C. for 10 min, 95° C. for 15 sec, and 56° C. for 1 min for 40 cycles.

TABLE 10
Relative transgene expression levels in transgenic plants comprising
SEQ NO: 3

| Transgenic | |
|---|---|
| Event ID | PinII Expression |
| Wild-type | 1 |
| ZM_M20388 | 689 |
| ZM_M21505 | 274 |
| ZM_M21509 | 319 |
| ZM_M21516 | 391 |

### Example 3

### Characterization of Physiological Phenotypes of Transgenic Plants Expressing a Heterologous Flavohemoglobin Protein

[0103] The physiological efficacy of transgenic corn plants (tested as hybrids) can be tested for nitrogen use efficiency (NUE) traits in a high-throughput nitrogen (N) screen. The collected data are compared to the measurements from wildtype controls using a statistical model to determine if the changes are due to the transgene. Raw data were analyzed by SAS software. Results shown herein are the comparison of transgenic plants relative to the wildtype controls.

(1) Media Preparation for Planting a NUE Protocol

[0104] Planting materials used: Metro Mix 200 (vendor: Hummert) Cat. # 10-0325, Scotts Micro Max Nutrients (vendor: Hummert) Cat. # 07-6330, OS 4⅓″×3⅞″ pots (vendor: Hummert) Cat. # 16-1415, OS trays (vendor: Hummert) Cat. # 16-1515, Hoagland's macronutrients solution, Plastic 5″ stakes (vendor: Hummert) yellow Cat. # 49-1569, white Cat. # 49-1505, Labels with numbers indicating material contained in pots. Fill 500 pots to rim with Metro Mix 200 to a weight of ˜140 g/pot. Pots are filled uniformly by using a balancer. Add 0.4 g of Micro Max nutrients to each pot. Stir ingredients with spatula to a depth of 3 inches while preventing material loss.

(2) Planting a NUE Screen in the Greenhouse

a. Seed Germination

[0105] Lightly water each pot twice using reverse osmosis purified water. The first watering should occur just before planting, and the second watering should occur after the seed has been planted in the pot. Ten Seeds of each entry (1 seed per pot) are planted to select eight healthy uniform seedlings. Additional wildtype controls are planted for use as border rows. Alternatively, 15 seeds of each entry (1 seed per pot) are planted to select 12 healthy uniform seedlings (this larger number of plantings is used for the second, or confirmation, planting). Place pots on each of the 12 shelves in the Conviron growth chamber for seven days. This is done to allow more uniform germination and early seedling growth. The following growth chamber settings are 25° C./day and 22° C./night, 14 hours light and ten hours dark, humidity ˜80%, and light intensity ˜350 μmol/m²/s (at pot level). Watering is done via capillary matting similar to greenhouse benches with duration of ten minutes three times a day.

b. Seedling Transfer

[0106] After seven days, the best eight or 12 seedlings for the first or confirmation pass runs, respectively, are chosen and transferred to greenhouse benches. The pots are spaced eight inches apart (center to center) and are positioned on the benches using the spacing patterns printed on the capillary matting. The Vattex matting creates a 384-position grid, randomizing all range, row combinations. Additional pots of controls are placed along the outside of the experimental block to reduce border effects.

[0107] Plants are allowed to grow for 28 days under the low N run or for 23 days under the high N run. The macronutrients are dispensed in the form of a macronutrient solution (see composition below) containing precise amounts of N added (2 mM NH₄NO₃ for limiting N screening and 20 mM NH₄NO₃ for high N screening runs). Each pot is manually dispensed 100 ml of nutrient solution three times a week on alternate days starting at eight and ten days after planting for high N and low N runs, respectively. On the day of nutrient application, two 20 min waterings at 05:00 and 13:00 are skipped. The vattex matting should be changed every third run to avoid N accumulation and buildup of root matter.

TABLE 11
This table shows the amount of nutrients in the nutrient solution for
either the low or high nitrogen screen.

| | 2 mM NH₄NO₃ | 20 mM NH₄NO3 (high |
|---|---|---|
| | (Low Nitrogen Growth | Nitrogen Growth |
| | Condition, Low N) | Condition, High N) |
| Nutrient Stock | mL/L | mL/L |
| 1 M NH₄NO₃ | 2 | 20 |
| 1 M KH₂PO₄ | 0.5 | 0.5 |
| 1 M MgSO₄.7H₂O | 2 | 2 |
| 1 M CaCl₂ | 2.5 | 2.5 |
| 1 M K₂SO₄ | 1 | 1 |

Note:
Adjust pH to 5.6 with HCl or KOH

c. Harvest Measurements and Data Collection

[0108] After 28 days of plant growth for low N runs and 23 days of plant growth for high N runs, the following measurements are taken (phenocodes in parentheses): total shoot fresh mass (g) (SFM) measured by Sartorius electronic balance, V6 leaf chlorophyll measured by Minolta SPAD meter (relative units) (LC), V6 leaf area (cm 2) (LA) measured by a Li-Cor leaf area meter, V6 leaf fresh mass (g) (LFM) measured by Sartorius electronic balance, and V6 leaf dry mass (g) (LDM) measured by Sartorius electronic balance. Raw data were analyzed by SAS software. Results shown are the comparison of transgenic plants relative to the wildtype controls.

[0109] To take a leaf reading, samples were excised from the V6 leaf. Since chlorophyll meter readings of corn leaves are affected by the part of the leaf and the position of the leaf on the plant that is sampled, SPAD meter readings were done on leaf six of the plants. Three measurements per leaf were taken, of which the first reading was taken from a point one-half the distance between the leaf tip and the collar and halfway from the leaf margin to the midrib while two were taken toward the leaf tip. The measurements were restricted in the area from ½ to ¾ of the total length of the leaf (from the base) with approximately equal spacing between them. The average of the three measurements was taken from the SPAD machine.

[0110] The characterization of physiological phenotypes according to the procedure disclosed above was carried out for corn transgenic lines comprising SEQ NO: 3 including ZM_M21516, ZM_M21505, ZM_M20388 and ZM_M21509.

TABLE 12
Increased chlorophyll level in transgenic corn plant comprising the E. coli
HMP gene grown under the limiting nitrogen condition
Chlorophyll (SPAD) results for corn plants grown under limiting nitrogen condition

| | Run 1 | | | | Run 2 | | | |
|---|---|---|---|---|---|---|---|---|
| Transgenic | | | | % | | | | % |
| Event | Transgenic | Control | Difference | Difference | Transgenic | Control | Difference | Difference |
| 20388 | 25.1 | 23.4 | 1.7 | 7 (a) | 25.1 | 23.8 | 1.3 | 6 (b) |
| 21505 | 25.1 | 23.4 | 1.70 | 7 (a) | 27.2 | 23.8 | 3.3 | 14 (a) |
| 21509 | ND | ND | ND | ND | ND | ND | ND | ND |
| 21516 | ND | ND | ND | ND | ND | ND | ND | ND |
| | Run 3 | | | | Run 4 | | | |
| Transgenic | | | | % | | | | % |
| Event | Transgenic | Control | Difference | Difference | Transgenic | Control | Difference | Difference |
| 20388 | 28.6 | 27.6 | 1.0 | 4 (n) | 22.7 | 21.3 | 1.4 | 7 (b) |
| 21505 | 31.3 | 27.6 | 3.7 | 13 (a) | 22.8 | 21.3 | 1.5 | 7 (b) |
| 21509 | 29.4 | 27.6 | 1.8 | 6 (b) | 22.8 | 21.3 | 1.5 | 7 (b) |
| 21516 | 28.7 | 27.6 | 1.1 | 4 (n) | 22.7 | 21.3 | 1.4 | 7 (b) |

(a): highly significant, p < 0.01 in the current dataset
(b): significant, 0.01 < p < 0.05 in the current dataset
(c): significant, 0.05 < p < 0.1 in the current dataset
(n): non-significant, p > 0.1 in the current dataset
ND: not determined in the current dataset

[0111] TABLE 13
Increased shoot fresh mass in transgenic comprising the E. coli
HMP gene under the sufficient nitrogen condition
Shoot Fresh Mass Results for transgenic plants grown under the sufficient nitrogen condition

| | Run 1 | | | | Run 2 | | | |
|---|---|---|---|---|---|---|---|---|
| Transgenic | Transgenic | Control | Difference | % | Transgenic | | Difference | % |
| Event | (g) | (g) | (g) | Difference | (g) | Control (g) | (g) | Difference |
| 20388 | 68.7 | 54.8 | 13.9 | 25 (a) | 87.8 | 86.3 | 1.5 | 2 (n) |
| 21505 | 65.6 | 54.8 | 10.8 | 20 (a) | 94.3 | 86.3 | 7.9 | 9 (n) |
| 21509 | 56.4 | 54.8 | 1.6 | 3 (n) | 100.8 | 86.3 | 14.5 | 17 (b) |
| 21516 | 40.9 | 54.8 | 13.9 | −25 (a) | 120.3 | 86.3 | 33.9 | 39 (a) |

| | Run 3 | | | | Run 4 | | | |
|---|---|---|---|---|---|---|---|---|
| Transgenic | Transgenic | Control | Difference | % | Transgenic | Control | Difference | % |
| Event | (g) | (g) | (g) | Difference | (g) | (g) | (g) | Difference |
| 20388 | 63.1 | 55.1 | 8.0 | 15 (a) | 58.8 | 52.2 | 6.6 | 13 (c) |
| 21505 | 56.9 | 55.1 | 1.8 | 3 (n) | 68.1 | 52.2 | 15.9 | 31 (a) |
| 21509 | ND | ND | ND | ND | 61.6 | 52.2 | 9.4 | 18 (b) |
| 21516 | ND | ND | ND | ND | 61.8 | 52.2 | 9.7 | 19 (b) |

(a): highly significant, p < 0.01 in the current dataset
(b): significant, 0.01 < p < 0.05 in the current dataset
(c): significant, 0.05 < p < 0.1 in the current dataset
(n): non-significant, p > 0.1 in the current dataset
ND: not determined in the current dataset

### Example 4

### Characterization of Plant Yield

[0112] Of particular interest is the identification of transgenic plants having improved yield as the result of enhanced seed sink potential and/or strength. The sink approach includes strategies to enhance sink potential (the number and size of endosperm cells or of kernels) and to enhance sink strength (the rate of starch biosynthesis). Sink potential can be established very early during kernel development, as endosperm cell number and cell size are determined within the first few days after pollination. Carbon flow to the ear during development may be limited by the size of the grain sink. Improvements in sink strength have been suggested to enhance yield by promoting the redistribution of photoassimilate from stem to kernel tissue.

[0113] Much of the increase in corn yield of the past several decades has resulted from an increase in planting density. During that period, corn yield has been increasing at a rate of 2.1 bushels/acre/year, but the planting density has increased at a rate of 250 plants/acre/year. A characteristic of modern hybrid corn is the ability of these varieties to be planted at high density. Many studies have shown that a higher than current planting density should result in more biomass production, but current germplasm does not perform well at these higher densities. One approach to increasing yield is to increase harvest index (HI), the proportion of biomass that is allocated to the kernel compared to total biomass, in high density plantings.

[0114] The ability of a plant to convert CO₂ and light into carbon which can be exported to developing seeds is known as source potential. Several lines of genetic, physiological and biochemical evidence suggest that source potential is a direct contributor to yield. Approaches to increase source potential, and thus yield by enhancing net carbon assimilation include increasing intrinsic photosynthetic efficiency, altering the partitioning and export of assimilates, and modifying plant architecture. Genes that can change these properties in a beneficial manner have been identified and introduced into plants.

[0115] The design of yield testing by the present invention is a high throughput hybrid yield screening process. It is based on two year complementary multi-location testing. Both Year 1 and Year 2 trials are multi location, single rep per location experiments arranged using spatially based experimental design. All trials at different locations are grown under optimal production management practices, and maximum pest control.

(1) Year 1 Trial

[0116] Year1 trial is the first level screen for yield where many transgenic events are expected to be tested using the approach mentioned above with moderate power (85%) to detect 7.5% yield difference. At each field location of up to 16 different geographic locations, events representing recombinant DNA constructs selected from the present invention, multiple positive and negative control plants, and pollinator plots are planted. The plot size is two row plots, 20 ft long×5 ft wide with 30 in distance between rows and three ft alley between ranges. Events grouped within constructs are randomly placed in the field. All other entries are also randomly placed in the field. A pollinator plot (LH244XLH59) is planted for every two plots of male sterile transgenic events. The planting density is approximately 28000-33000 plants/acre. The trial is open pollinated.

(2) Year 2 Trial

[0117] Year 2 trial is confirmatory yield trial with events advanced based on Year 1 hybrid yield performance. Year 2 trials are designed to provide >80% power to detect 5-10% of yield difference. At each of up to 16 different geographic locations (or at least 20 growing environments), plots comprising events representing recombinant DNA constructs selected from the present inventions, multiple positive and negative control plants, and pollinator plots are planted. The plot size is two row plots, 20 ft long×5 ft wide with 30 in distance between rows and 3 ft alley between ranges. Events representing the same construct are grouped within construct block and that section randomly placed in the field. All other entries are also randomly placed in the field. A pollinator plot (LH244XLH59) is planted for every two plots of male sterile transgenic events. The planting density is approximately 28000 to 33000 plants/acre. The trial is open pollinated.

(3) Statistical Method

[0118] This method comprises three major components: modeling spatial autocorrelation of the test field separately for each location, adjusting phenotypes of transgene-entries for spatial dependence for each location, and conducting an across location analysis and making gene advancement decisions. In addition, the method also has the capability to estimate the effects of different seed sources and adjust accordingly. This is done separately for each location when phenotypes of transgene-entries are adjusted for spatial dependence.

a. Modeling Spatial Autocorrelation

Estimating the Covariance Parameters

[0119] Estimating the covariance parameters of the semivariogram is the first step. A spherical covariance model is assumed to model the spatial autocorrelation. Because of the size and nature of the trial, it is highly likely that the spatial autocorrelation may change. Therefore, anisotropy is also assumed along with spherical covariance structure. The following set of equations describes the statistical form of the anisotropic spherical covariance model.

$$C ( h \text{;} θ ) = vI ( h = 0 ) + {σ}^{2} ( 1 - \frac{3}{2} h + \frac{1}{2} {h}^{3} ) I ( h < 1 ) ,$$

where I(●) is the indicator function,
h={square root over (\dot{x}²+\dot{y}²,
and
\dot{x}=[cos(ρπ/180)(x₁−x₂)−sin(ρπ/180)(y₁−y₂)]ωₓ
\dot{y}=[sin(ρπ/180)(x₁−x₂)+cos(ρπ/180)(y₁−y₂)]/ω_{y}
where s₁=(x₁, y₁) are the spatial coordinates of one location and S₂=(x₂, y₂) are the spatial coordinates of the second location. There are 5 covariance parameters, θ=(ν, σ², ρ, ωₙ, ωⱼ), where □ is the nugget effect, □² is the partial sill, □ⱼ is a rotation in degrees clockwise from north, □ₙ is a scaling parameter for the minor axis and □ⱼ is a scaling parameter for the major axis of an anisotropical ellipse of equal covariance.

[0120] The five covariance parameters that define the spatial trend will then be estimated by using data from heavily replicated pollinator plots via restricted maximum likelihood approach. In a multi-location field trial, the spatial trend is modeled separately for each location.

b. Building Variance-Covariance Matrix

[0121] After obtaining the variance parameters of the model, variance-covariance structure will be generated for the data set to be analyzed. This variance-covariance structure will contain the spatial information required to adjust transgene (unreplicated) yields for spatial dependence.

Adjusting Transgene Data for Spatial Dependence

[0122] Adjusting the transgene data for spatial dependence is the next step. In this case, a nested model that best represents the treatment and experimental design of the study will be used along with the variance-covariance structure to adjust the yields of transgene-entries for spatial dependence. During this process the nursery or the seed batch effects can also be modeled and estimated to adjust the yields for any yield parity caused by seed batch differences.

Combined Location Analysis

[0123] Spatially adjusted data from different locations are first generated. Then all the adjusted data will be combined and analyzed assuming locations as replications using the third phase of this method. In this analysis, intra and inter-location variances will be combined to estimate the standard error of the transgene and any associated treatment control data.

[0124] The yield analysis according to the procedure disclosed above was carried out for corn transgenic lines comprising SEQ NO: 3 including ZM_M21516, ZM_M21505, ZM_M20388 and ZM_M21509, and corn transgenic lines comprising SEQ NO: 4 including ZM_M14965, ZM_M16110, ZM_M16104 and ZM_M14973.

TABLE 14
Year 1 yield results for transgenic corn plants comprising the E. coli HMP gene
2004 Yield for transgenic corn plants comprising the E. coli HMP gene

| | Transgenic | Control | | | | |
|---|---|---|---|---|---|---|
| Transgenic | Yield, | Yield, | Transgenic − Control, | Percent | P- | |
| Event | Bu/Ac | Bu/Ac | Bu/Ac | Difference | Value | Significance |
| ZM_M21516 | 237.6 | 226.2 | 11.4 | 5.10% | 0.0066 | Significant |
| ZM_M21505 | 216.8 | 226.2 | −9.4 | −4.10% | 0.0257 | Significant |
| ZM_M20388 | 223 | 226.2 | −3.1 | −1.40% | 0.4561 | Not significant |
| ZM_M21509 | 221.4 | 226.2 | −4.8 | −2.10% | 0.2515 | Not significant |

[0125] TABLE 15
Year 2 yield results for transgenic corn plants comprising the E. coli HMP gene
2005 Yield for transgenic corn plants comprising the E. coli HMP gene

| | Transgenic | Control | | | | |
|---|---|---|---|---|---|---|
| Transgenic | Yield, | Yield, | Transgenic − Control, | Percent | P- | |
| Event | Bu/Ac | Bu/Ac | Bu/Ac | Difference | Value | Significance |
| ZM_M21516 | 176.9 | 179.9 | −3.0 | −1.68% | 0.2909 | Not significant |
| ZM_M21505 | Not tested | / | / | / | / | / |
| ZM_M20388 | 179.1 | 179.9 | −0.8 | −0.45% | 0.7781 | Not significant |
| ZM_M21509 | 168.4 | 179.9 | −11.5 | −6.38% | 0 | Significant |

[0126] In 2004, the mean control yield was 226.2 bushels/acre versus 179.9 bushels/acre in 2005, the latter being a drought year. Reduced water uptake during drought conditions also restricts nutrient uptake from the soil solution hence confounding the yield response. Thus, differences in yield potential and growing conditions from 2004 to 2005 do not allow a valid comparison of the yield response, but provide a clue to the gene effect with environment interaction.

TABLE 16
Yield 1 yield results for transgenic corn plants comprising the Yeast YHB1 gene
2003 Yield for transgenic corn plants comprising the Yeast YHB1 gene

| | Transgenic | Control | | | | |
|---|---|---|---|---|---|---|
| Transgenic | Yield, | Yield, | Transgenic − Control, | Percent | P- | |
| Event | Bu/Ac | Bu/Ac | Bu/Ac | Difference | Value | Significance |
| ZM_M14965 | 154.4 | 155.4 | −1 | −1% | 0.8731 | Not |
| | | | | | | significant |
| ZM_M16110 | 159.7 | 155.4 | 4.3 | 3% | 0.4995 | Not |
| | | | | | | significant |
| ZM_M16104 | 158.5 | 155.4 | 3.2 | 2% | 0.6551 | Not |
| | | | | | | significant |
| ZM_M14973 | 148.1 | 155.4 | −7.3 | −5% | 0.2757 | Not |
| | | | | | | significant |

[0127] TABLE 17
Year 2 yield results for transgenic corn plants comprising the Yeast YHB1 gene
2004 Yield for transgenic corn plants comprising the Yeast YHB1 gene

| | Transgenic | Control | | | | |
|---|---|---|---|---|---|---|
| Transgenic | Yield, | Yield, | Transgenic − Control, | Percent | P- | |
| Event | Bu/Ac | Bu/Ac | Bu/Ac | Difference | Value | Significance |
| ZM_M14965 | 225.8 | 218.7 | 7.1 | 3.20% | 0.0068 | Significant |
| ZM_M16110 | 223.3 | 218.7 | 4.6 | 2.10% | 0.0775 | Significant |
| ZM_M16104 | 220.6 | 218.7 | 1.9 | 0.90% | 0.4598 | Not |
| | | | | | | significant |
| ZM_M14973 | 217.4 | 218.7 | −1.3 | −0.60% | 0.6281 | Not |
| | | | | | | significant |

[0128] Overall, in 2004, the environment in the locations of field yield testing was more favorable for yield production than that in 2003, which may account for the difference in yield performance of transgenic plants comprising SEQ ID NO: 4.

### Example 5

### E. coli HMP Reduces the NO Level in Plants

[0129] A confocal microscopy analysis was carried out to detect the NO levels in transgenic corn plants comprising the E. coli HMP gene using a NO-specific dye named DAF-2DA (Calbiochem). DAF-2DA is the most sensitive reagent available for detecting NO: its detection limit is 5 nM, two orders of magnitude lower than next best method, paramagnetic resonance spectroscopy. Four maize events, namely ZM_M21505, ZM_M21516, ZM_M20388, ZM_M 21509 and nontransgenic controls were planted in the greenhouse under standard maize growing conditions. 12 plants/event were grown in the presence of either the limiting nitrogen growth condition (2 mM ammonium nitrate) or the sufficient nitrogen growth condition (20 mM ammomium nitrate). Additionally, border plants were included in the experiment to ensure homogeneity in growth conditions. The plants were randomized using Virgo's Make-a-map program. When plants reached V6 stage, 2×2 inch leaf samples were harvested from the terminal segment of the leaf blade and immediately incubated in Tris 10 mM pH=7 during transportation to the microscopy lab. At least ten very thin (one mm wide) sections per sample were then generated from each harvested leaf and incubated in dark in 10 micromolar DAF-2DA in distilled water for 1 hour under gentle shaking. NO levels were visualized using a confocal laser scanning microscope (Zeiss LSM510). Images were processed using the Zeiss LSM Image Browser. On average, three plants per event were analyzed along with controls grown under the same conditions. In all four events, transgenic plants grown under limiting or sufficient nitrogen showed lower levels of NO compared to controls grown under the same conditions.

[0130] This experiment also allowed for the exploration of the spatial expression of NO in corn plants. Under either the sufficient or the limiting nitrogen growth condition, the DAF-2DA staining signals were localized in bundle sheath cells and mesophyll cells of control plants, suggesting that these cells are involved in NO metabolism and also that they contain the required esterases for activation of DAF2-DA. It was also observed a reduction of DAF-2DA signal in bundle sheath cells and mesophyll cells in transgenic corn plants comprising the E. coli HMP gene, which is consistent with the expected molecular activity of flavohemoglobin and the expected pattern of transgene expression driven by the rice actin promoter in these cell types. In addition, the histogram function provided by the Carl Zeiss LSM Image Examiner was used to quantify the NO-specific signals. We demonstrated a decrease in DAF2-DA staining intensity in transgenics vs. controls in five plants belonging to event ZM_M21516.

TABLE 18
Percent decrease in DAF2-DA staining intensity
in five transgenic plants of event ZM_M21516

| | % decrease |
|---|---|
| | in transgenic corn |
| | plants as compared to |
| ZM_M21516 lines tested | controls |
| Transgenic plant 1 vs. control 1 | 31.01773 |
| Transgenic plant 2 vs. control 2 | 52.75593 |
| Transgenic plant 3 vs. control 3 | 40.91894 |
| Transgenic plant 4 vs. control 4 | 52.41726 |
| Transgenic plant 5 vs. control 5 | 78.37197 |
| Average of Decrease | 51.09636 |
| St. Dev. | 17.71433 |

### Example 6

### Analysis of Free Amino Acid Content in Transgenic Corn Plants Comprising the E. coli HMP Gene

[0131] Transgenic events and non-transgenic controls were grown under sufficient nitrogen fertilized with 225 lbs. N/Ac. When plants reached stage V12, the ear leaf was removed from 12 plants each of wild-type or either transgenic events, then analyzed for free amino acids.

[0132] Samples were prepared accurately weighing approximately 50 mg of homogenous dry powder and extracting it with 1.5 ml of a 10% w/v TCA solution. The sample was clarified by centrifugation and 0.5 ul of supernatant was analyzed for free amino acids. The HPLC system consisted of an Agilent 1100 HPLC with a cooled autosampler, a fluorescence detector, and a HP Chemstation data system. Separation of the amino acids was performed using precolumn o-phthalaldehyde (OPA) derivatization followed by separation using a Zorbax Eclipse-AAA 4.6×75 mm, 3.5 um column. Detection was by fluorescence and chromatograms were collected using the HP Chemstation. All standards and reagents were purchased from Agilent Technologies.

[0133] Ref: Rapid, Accurate, Sensitive and Reproducible Analysis of Amino Acids; John W. Henderson, Robert D. Ricker, Brian A. Bidlingmeyer, Cliff Woodward, Agilent publication 5980-1193EN

TABLE 19
Free amino acid levels in corn plant leaves

| Amino | Wild-type | Event ZM_M21505 | | Event ZM_M 20388 | |
|---|---|---|---|---|---|
| Acid | PPM | PPM | % Change | PPM | % Change |
| Ala | 2329 | 2812 | 20.7 (a) | 1878 | −19.4 (a) |
| Glu | 1741 | 2301 | 32.2 (a) | 1396 | −19.8 (a) |
| Ser | 369 | 510 | 38.2 (a) | 296 | −19.8 (n) |
| Gln | 218 | 329 | 50.9 (a) | 144 | −33.9 (a) |
| Thr | 157 | 212 | 35.0 (a) | 116 | −26.1 (n) |
| Arg | 119 | 77 | −35.3 (n) | 65 | −45.4 (a) |
| Gly | 119 | 185 | 55.5 (a) | 37 | −68.9 (a) |
| Asn | 114 | 246 | 115.8 (a) | 52 | −54.4 (a) |
| Asp | 108 | 56 | −48.1 (n) | 84 | −22.2 (n) |
| Val | 9 | 0 | 0 | 0 | 0 |
| Tyr | 3.3 | 0 | 0 | 0 | 0 |
| His | 0 | 0 | 0 | 0 | 0 |
| Ile | 0 | 0 | 0 | 0 | 0 |
| Leu | 0 | 0 | 0 | 0 | 0 |
| Lys | 0 | 0 | 0 | 0 | 0 |
| Met | 0 | 0 | 0 | 0 | 0 |
| Phe | 0 | 0 | 0 | 0 | 0 |
| Trp | 0 | 0 | 0 | 0 | 0 |
| Total | 5286.3 | 6728 | 27.3 (a) | 4068 | −23.0 (a) |

(a): Significant, p < 0.05 in the current dataset
(n): non-significant in the current dataset
0: not detected in the current dataset

### Example 7

### Identification of Homologs

[0134] A BLAST searchable “All Protein Database” was constructed of known protein sequences using a proprietary sequence database and the National Center for Biotechnology Information (NCBI) non-redundant amino acid database (nr.aa). For E. Coli, from which the polynucleotide sequence as set forth in SEQ ID NO:1 was obtained, an “Organism Protein Database” was constructed of known protein sequences of the organism. The Organism Protein Database is a subset of the All Protein Database based on the NCBI taxonomy ID for the organism.

[0135] The All Protein Database was queried using the amino acid sequence as set forth in SEQ ID NO: 5 by “blastp” with an E-value cutoff of 1e-8. Up to 1000 top hits were kept, and separated by organism names. For each organism other than E. coli, a list was kept for hits from the query organism itself with a more significant E-value than the best hit of the organism. The list contains likely duplicated genes, and is referred to as the Core List. Another list was kept for all the hits from each organism, sorted by E-value, and referred to as the Hit List.

[0136] The Organism Protein Database was queried using the amino acid sequence as set forth in SEQ ID NO: 5 using “blastp” with E-value cutoff of 1e-4. Up to 1000 top hits were kept. A BLAST searchable database was constructed based on these hits, and is referred to as “SubDB”. SubDB was queried with each sequence in the Hit List using “blastp” with E-value cutoff of 1e-8. The hit with the best E-value was compared with the Core List from the corresponding organism. The hit is deemed a likely ortholog if it belongs to the Core List, otherwise it is deemed not a likely ortholog and there is no further search of sequences in the Hit List for the same organism. Likely orthologs from a large number of distinct organisms were identified and are reported by amino acid sequences of SEQ ID NO: 130 to SEQ ID NO: 256.

[0137] All patents, patent applications and publications cited herein are incorporated by reference in their entirety to the same extent as if each individual patent, patent application or publication was specifically and individually indicated to be incorporated by reference.

What is claimed is:

1. A non-naturally occurring DNA comprising a polynucleotide sequence selected from the group consisting of SEQ ID NO: 1, 2 and 260, and complement thereof.

2. A recombinant DNA construct for plant transformation comprising a polynucleotide selected from the group consisting of SEQ ID NO: 1, 2 and 260.

3. The recombinant DNA construct according to claim 2 that further comprises a promoter for plant expression.

4. The recombinant DNA construct according to claim 3, wherein said promoter is selected from a group consisting of a constitutive promoter, a green tissue preferred promoter, a phloem preferred promoter and a root tissue preferred promoter.

5. Transgenic seed comprising a heterologous flavohemoglobin gene in its genome, wherein transgenic plants grown from said transgenic seed exhibit an improved agronomic trait, as compared to a control plant.

6. Transgenic seed according to claim 5, wherein said flavohemoglobin gene encodes a protein having an amino acid sequence selected from the group consisting of SEQ ID NO: 5 and 6, and homologs thereof.

7. Transgenic seed according to claim 6, wherein said homolog has an amino acid sequence selected from the group consisting of SEQ ID NO: 130 through SEQ ID NO: 256.

8. Transgenic seed according to claim 5, wherein said improved agronomic trait is a:
(a) faster rate of growth,
(b) increased fresh or dry biomass,
(c) increased seed or fruit yield,
(d) increased seed or fruit nitrogen content,
(e) increased free amino acid content in whole plant,
(f) increased free amino acid content in seed or fruit,
(g) increased protein content in seed or fruit,
(h) increased chlorophyll level, and/or
(i) increased protein content in vegetative tissue.

9. Transgenic seed according to claim 5, wherein said transgenic plants having an improved agronomic trait are grown under a sufficient nitrogen growth condition or a limiting nitrogen growth condition.

10. A method of producing a transgenic plant having an improved agronomic trait, wherein said method comprises
(a) transforming plant cells with a recombinant DNA construct for expressing a flavohemoglobin protein;
(b) regenerating plants from said cells; and
(c) screening said plants to identify an improved agronomic trait.

11. The method according to claim 10, wherein said improved agronomic trait is a:
(a) faster rate of growth,
(b) increased fresh or dry biomass,
(c) increased seed or fruit yield,
(d) increased seed or fruit nitrogen content,
(e) increased free amino acid content in whole plant,
(f) increased free amino acid content in seed or fruit,
(g) increased protein content in seed or fruit,
(h) increased chlorophyll level, and/or
(i) increased protein content in vegetative tissue.

12. The method according to claim 10, wherein said transgenic plants are grown under a sufficient nitrogen growth condition or a limiting nitrogen growth condition.

13. The method according to claim 10, wherein said recombinant DNA construct comprises a polynucleotide encoding a protein having an amino acid sequence selected from the group consisting of SEQ ID NO: 5 and 6, and homologs thereof.

14. The method according to claim 13, wherein said homolog has an amino acid sequence selected from the group consisting of SEQ ID NO: 130 through SEQ ID NO: 256.

15. The method according to claim 14, wherein said recombinant DNA construct further comprises a promoter for plant expression.

16. The method according to claim 15, wherein said promoter selected from the group consisting of a constitutive promoter, a root preferred promoter, a phloem preferred promoter and a green tissue preferred promoter.

17. The method according to claim 16, wherein said constitutive promoter is rice actin promoter.

18. The method according to claim 16, wherein said root preferred promoter is rice RCC3 promoter.

19. The method according to claim 16, wherein said green tissue preferred promoter is FDA or PPDK promoter.

20. The method according to claim 16, wherein said phloem preferred promoter is RTBV promoter.

The application's sequence listing, which the Patent Office published only in electronic form, follows.

SEQUENCE LISTING (272 sequences)

SEQ ID NO: 1 - DNA, 1197 bp, Artificial
  optimized E coli HMP gene
atgctagacgcccagaccatcgccaccgttaaggccaccatccccttgctagtggagaccggccctaagctgaccgcccacttctacgaccgcatgttcacccacaaccctgagctgaaggagattttcaacatgagcaaccagcgtaacggcgaccagcgcgaggccctcttcaacgccatcgccgcttacgcctccaacatcgagaacctccccgccctcctgcccgccgtggagaagatcgcccagaagcacacctccttccagatcaagcccgagcagtacaacatcgtgggcgagcacctcctggccaccctcgacgagatgttctcccctggccaggaggtgctcgacgcctggggcaaggcctacggcgtgctcgccaacgtgttcatcaaccgcgaggccgaaatctacaacgagaacgctagcaaggctggcggttgggagggcacccgcgacttcaggattgtggctaagactcccaggtccgctctcattactagcttcgagctggagcccgtggacggcggtgctgtggctgagtaccgtcctggccagtacctcggcgtgtggctcaagcctgagggcttcccgcaccaggagattaggcagtattctctcactaggaagccggacggcaagggctaccggattgctgtgaagcgggaggaaggtgggcaggtctctaactggctgcacaatcacgctaatgtcggtgacgtcgttaagctggtcgctccggctggtgacttctttatggctgtcgcggacgatactccggtcactctgataagtgcgggtgtcggtcagacgccgatgctggcgatgctggacacgcttgcgaaggcggggcacacggcgcaggtcaattggttccacgcggcagagaatggggatgtccatgcgttcgcggatgaggttaaggagcttgggcagtctcttccaagattcacggcacatacctggtacagacagccatcggaagcagatcgagcaaaggggcagttcgattcggaagggcttatggatctttcaaagttagaaggagcattttcagatccaacaatgcaattttatctttgcggaccagttggattcatgcaattcacagcaaaacaacttgttgatttgggagttaaacaagaaaacatacactatgaatgctttggaccacataaggtattgtgagaattc

SEQ ID NO: 2 - DNA, 1206 bp, Artificial
  optimized Yeast YHB1 gene
atgctcgccgagaagactaggtccatcattaaggccaccgtgcccgtgctagagcagcaaggcaccgtgattactaggaccttctacaagaacatgctgaccgagcacactgagctgctgaacatcttcaaccgcactaaccagaaggtgggcgctcagcccaacgccctcgccaccactgtgctcgccgctgccaagaacatcgacgatctctccgtgctcatggaccacgtgaagcagatcggccacaagcaccgcgccctccagatcaagcccgagcactaccctatcgtgggcgagtacctcctgaaagccatcaaggaggtgctcggcgacgccgctactcccgagatcattaacgcctggggcgaggcttaccaggccatcgccgacatcttcatcaccgtggagaagaagatgtacgaggaagccctctggcccggctggaaacccttcgacatcaccgccaaggagtacgtcgcttccgacatcgtcgagttcaccgtcaagcctaagttcggcagcggtatcgagctggagtccctccctatcacgcctggtcagtacatcaccgtcaacacccaccctatccgccaggagaaccagtacgacgctctcaggcactactctctgtgctctgcttctacgaagaacggtctgcgtttcgctgtcaagatggaggctgcgcgggagaacttcccggctggtctggtcagcgagtacctgcacaaggacgctaaggtcggagacgagatcaagctgagcgcgccagcgggagacttcgcgattaacaaggagctgattcaccagaatgaggtcccgcttgtccttcttagctcgggagtcggcgttacgccgttgcttgcgatgcttgaggaacaagttaagtgcaatccgaatagaccgatttattggattcagtcgtcatacgacgagaagacgcaagcgtttaagaaacacgttgatgagcttcttgcggaatgcgcgaatgttgataagattattgttcataccgataccgaaccattgataaatgccgcattcttgaaggagaagtcaccagcacatgccgatgtttacacatgcgggagtctagcattcatgcaagcaatgatagggcacttaaaggaattggaacatcgagatgacatgatacactatgaaccattcgggccaaagatgagtaccgttcaagtatgagaattc

SEQ ID NO: 3 - DNA, 1191 bp, Escherichia coli
atgcttgacgctcaaaccatcgctacagtaaaagccaccatccctttactggtggaaacggggccaaagttaaccgcccatttctacgaccgtatgtttactcataacccagaactcaaagaaatttttaacatgagtaaccagcgtaatggcgatcaacgtgaagccctgtttaacgctattgccgcctacgccagtaatattgaaaacctgcctgcgctgctgccagcggtagaaaaaatcgcgcagaagcacaccagcttccagatcaaaccggaacagtacaacatcgtcggtgaacacctgttggcaacgctggacgaaatgttcagcccggggcaggaagtgctggacgcgtggggtaaagcctatggtgtactggctaatgtatttatcaatcgcgaggcggaaatctataacgaaaacgccagcaaagccggtggttgggaaggtactcgcgatttccgcattgtggctaaaacaccgcgcagcgcgcttatcaccagcttcgaactggagccggtcgacggtggcgcagtggcagaataccgtccggggcaatatctcggcgtctggctgaagccggaaggtttcccacatcaggaaattcgtcagtactctttgactcgcaaaccggatggcaaaggctatcgtattgcggtgaaacgcgaagagggtgggcaggtatccaactggttgcacaatcacgccaatgttggcgatgtcgtgaaactggtcgctccggcaggtgatttctttatggctgtcgcagatgacacaccagtgacgttaatctctgccggtgttggtcaaacgccaatgctggcaatgctcgacacgctggcaaaagcaggccacacagcacaagtgaactggttccatgcggcagaaaatggcgatgttcacgcctttgccgatgaagttaaggaactggggcagtcactgccgcgctttaccgcgcacacctggtatcgtcagccgagcgaagccgatcgcgctaaaggtcagtttgatagcgaaggtctgatggatttgagcaaactggaaggtgcgttcagcgatccgacaatgcagttctatctctgcggcccggttggcttcatgcagtttaccgcgaaacagttagtggatctgggcgtgaagcaggaaaacattcattacgaatgctttggcccgcataaggtgctgtag

SEQ ID NO: 4 - DNA, 1200 bp, Saccharomyces cerevisiae
atgctagccgaaaaaacccgttccataatcaaagcaaccgttcctgttttggaacagcagggcactgtcatcacgcgtacattctacaaaaatatgcttactgaacacaccgaattacttaatatttttaacagaactaatcaaaaggttggcgcacaaccaaatgccttggccactactgttttggcagcggctaagaacattgacgatttgtctgtgcttatggaccatgtcaagcaaattggccacaagcatcgtgccttgcaaattaaacctgagcattatccaatcgttggtgagtacttgttaaaagcaatcaaggaagttttaggcgatgctgcgactccagagataattaatgcatggggcgaggcttaccaagcaattgctgacatcttcatcactgttgaaaaaaaaatgtacgaagaagctttatggccaggttggaaaccatttgacattactgccaaagagtacgttgcttcagatattgttgaatttactgttaagccaaagttcggttctggtattgaattggaaagcttgccaatcactccaggtcagtatattacggtaaacactcacccaattagacaggaaaaccaatacgacgctttaagacactactctctttgttctgcttcaactaaaaatggtttacgatttgcagtaaagatggaagctgccagagaaaattttcctgcaggattagtctctgaatatttacacaaggacgctaaagttggtgatgaaattaagcttagtgctccggctggtgatttcgcaataaataaagagttgatacaccaaaacgaagttccattggtgttactatcgtctggtgttggtgttacaccacttttagctatgttagaagaacaagtcaaatgcaacccaaataggccaatttactggattcaatcttcctatgatgaaaagactcaagcattcaaaaaacatgtagatgaactattagctgaatgtgcgaatgtcgacaaaataattgttcatactgatactgaaccactgattaatgctgcattcttgaaggaaaagtcacctgcgcatgccgatgtctacacttgcggctctttagcttttatgcaagctatgattggtcatctaaaagaactagagcatcgtgatgatatgattcactatgaaccatttggtccaaagatgtcaaccgtgcaagtttag

SEQ ID NO: 5 - protein, 396 aa, Escherichia coli [sequence omitted]

SEQ ID NO: 6 - protein, 399 aa, Saccharomyces cerevisiae [sequence omitted]

SEQ ID NO: 7 - DNA, 1197 bp, Streptomyces coelicolor
gtgctctccgaacagtccgttcccgtggtccgagccaccctccccgccgtcggagcggccatcggtgacatcgccgccctgttctaccgcaagctcttcgacgcccacccggagctgctgcgggacctgttcaaccgggggaaccaggccaacggcgagcagcagcgggccctggcgggctcggtcgccgcgttcgccggcctgctgctggagaacccggacgagcgcgccgacgtgctgctctcccgtatctcgcacaagcacgcctcgctcggcatcacccccgaccagtacacgatcgtccaccgccacctgatggccgccgtcgtcgacgtgctcggcgacgccgtcactcccgaggtggcccgggcctgggacgaggtctactggctgatggccaacgcgctcatcgccctggaggcccgcctctacaccgagaagggcgtcgcggagggagacgtctggcgcaccatggagatcgtcgaccgggtcgaggagagcgccgacgcggtctccctcgtcctggggtcggccgacggccgtcccgtcgtgccgttccggccgggtcagtacgtcagcgtccaggtcgaactggccgacggcgcccggcagatccgccagtacagcctgtccgccgcgcccggccggtccgactggcgcatcaccgtcaagcgcgtccggggcgacgggcagccggacggcgaggtctcctcctggctgtacgcgaacgcccgcaagggcgacgcgctcaacgtgtcgctgccggccggggacctggccctggccgagcacgacggcccgctgctgctggtctccgccggtatcggcgtcacaccgatgctctcgatgctcgaccacctggccgccgccggcgccacccgcccggtgaccgtggtgcacgccgaccgcacccccgaccaccacgcccaccggcaggagcagctcgacctgatacgcacgctgccgggcgcccggctccacctgtggtacgaggagcccggcgaccgggcgccggaggcgtccaccggccgcgccgacctgaccggcctcgacctgcccgcggacctcacggtctacctctgcggtccggtgcccttcatgcgcgcggtccgcggcgacctgctgcgccgcggggtgcccgccgaggccatccactacgaggtcttcggccccgacctctggctcggacagcagtag

SEQ ID NO: 8 - DNA, 1212 bp, Streptomyces coelicolor
atgctctccagtcagtcggcccagatcgtccgcgacacgctccccaccgtcggagcctcgctcggcacgatcaccgacctgttctaccgccgcatgttcgaggagcgtcccgagctcctgcgcgacctgttcaaccgcgcgaaccaggccagcggcgtccagcgcgaggcactggccggtgccgtcgccgccttcgcgaccgcgctcgtgaagcacccggacgagcgccccgacgccgtactcggccgcatcgcgaacaagcacgcgtcactgggcatcacgtccgaccagtacaccctcgtcggccgccacctcctcgcggccgtcgcggaggtcctcggcgacgccgtgaccccggcggtggcggccgcctgggacgaggtgtactggctcatggcgaacgccctcatcgccatggaggcgcgtctgtacgcccggtccgacgtcgaggacggctccgtgtggcagagcatggagatcgtcgaacgccacgaggagaccccggacacggcctccttcgtcctgcgtcccgccgacggctcacccacccgccccttcgtccccggccagtacgtcagcgtgcgggccgaactgccggacggagcacaccagatacggcagtacagcctctccagcgctcccggcggcgggacctggcgcttcaccgtgaagcgcgagcgctccctggacgggcaggtgccggacggggaggtctccacgtggctgcacacccacgcccgccccggtgacgtcctgcgggtgtccctgcccttcggtgacctcctgctgcccgagggcgacggtccgctcctgctggcctccgcgggcatcggtgtcacccccatgctcgccatgctggagcatctggccaccgcggcgcccgaccgtccggtgaccgtcgtccacgccgaccgctcccccgctctccacgcgcaccggctcgaactcaccgcgctcgtcgagcggctgccccacgcctcgctgcacctgtggtacgaggacaccgcggaccacccggacgcctcggcggaccacgtcaacgagggctgggccgacctcacgggcctgtccccggtccccggcaccaccgcgttcctgtgcgggccgctgtccttcatgaaggccgtccgcaccgacctgctcgcccacgggctgagccccagggccatccactacgaggtgttcggccccgatctgtggctcagcaagtag

SEQ ID NO: 9 - DNA, 1308 bp, Streptomyces coelicolor
gtgacgggcaggttcgagttcatgcaccagagctcccaccccgacagaccgaccaccccggcagacgattggagcggggccaacgcggcccacctcgctgcacccgctcgcatcgcagccgccccggcctctgtgactgacgaggacgtcgcgctggtacgggccagcctgacagttgtcactccccatgtgtccgagctggcagcgcacttctacagcatcctgttctcgcgttacccacaggtcagggacttgtttccggcggagctcgatgtccagcgggaacgtctggtgcgcgcactgctgcgcattgtggagctggtcgacgaccccgacaacctcgtggcgttctgctcccgcctgggacgcggccatcgcaagttcggcacgcagagcggccattatcctgctgtcggcgaatgcctgctgcaggccctttcccacttcgcgggcccggcatggcatccggcactggcgacggcatggcagcgcgcctacacggcagccgcggacgtgatggtccgggccgcggaagaggacgcccgtagccgcccagccgtatgggacgcgcacatcgtcgggcatgtccaccgggggcacggaatagccgagatcacggtccggccccaccagccgtacccgttcgtggcgggccagtacgtgagcatcgaaacgccgtgggcaccgaggcagtggcgtcagtactcccccgcgaacgccccgcgtcccaattccgaactgaccttccacgtgcgagccgtgcgcgagggaaaggtcagcaacgcgctcgtccaccacgctcgtccgggagaccctgtccgactcggcccgccggagggcgacatggtcttgcgtccaacccgccagcgggacctgctcttcgtggccggcggcaccggcctcgccccgattcgcgccctgatcgaagaggtggcccagggcagtatcagcgacgcacgtgaagtcagtctgttcatcggcgccagaacggcgaacgaactgtacggactcgatgacatgctgcgcatgtcccagcgctaccactggctgcgcgtccgggcggcggtctccgatgagcgcatcccgggcctggaaggcaccctgcccgaggtattggcggaattcggcccctggtaccggcacgaggcgtatctgtgcggcccaccgcaaatgctgagcggggccgtgcacgccctgcggcgccacggtgtcccgcctcgccacattcactacgacccctgggacacccctgtgctgaccgcacctttgggaccgcctccgcccgacgaggaggacgaccagctgtga

SEQ ID NO: 10 - DNA, 1539 bp, Rhodococcus sp.
atgactttccaagttgcactgagtttcgaggacgggatcacccgcttcatcaagtgtgacggcgacgagacggtcgccgacgcgtcctaccgcgcgcgcatcaacattcccctcgactgccgagacggggcgtgcggcacctgcaagtcgctctgcgaatccggcacgtacgacggcggcgactacatcgaggaggcgctcaccgacgaagaggcggagcacggttactgccttccgtgccagatgatgccggaaagcgatctggtactgcagatcccgaccacgtccgacgtcgccaagaccgccgcgggcacgttcacgtcgacggtcacggagatccgcaagttctccgacaccaccatcgggttcacgatcgagatcgcgaaccgggacgacctcgtcttcctccccggccagtacgtgaacatcaccgttcccggaaccgaagcgacgcgctcgtactcgttcagcaccggacccacgtcgaaggaactgtcgttcctggtcaagatcaccgacggcggcctgatgtcggagtacctgcgcagccgcgcacaggtcggcgacacgctcgagttcaccggcccgatgggaagcttcttcctccgcgagcagaagcgtcgcgccctgctgctggccggcggcaccgggctggccccgctgctgtcgatcctcgacaagatgcgcaccgacgccgccgaccaccccgtgcacctggtctacggtgtctcgtccgacgcggacctggtggaactggacaagctcgaggaatacacgaagtccctgccccagttcacgttcgactactgtgtgtccgacccggcgagcagtgcgccgaacaagggttacgtcaccggactgttcgagcccgcacacctgaacgacggcgatgtggacgtgtacctgtgcggtccgcctcccatggtcgaggcggtgcgcgaccacctgaagtcggagggcgtcacgccggcgaacttctacttcgagaagttcaacaacgcggcgacgcccagtgggtccgaggcgtccgcaccgccggcggccgagacggtcgaggcggcccccgagtacgagatcggcgaggaacaccagcctctgtccgagtcggacgcacagttcgacgcccgcatggcgctcgaactcggtgcgatggaactgaccatcggccggatgacgcaggaacagctgtccgagtaccggatcctcgccgagacctcgtgcgaatcgatcgagaacgaccacttcacggacgccggcgcgttcaccgacaccaacgccgccttccacgaattcctgttccggtgcaccgccaacgacgtgctcctcgaggcgtacaaccgcctggaggtcacgcagctcatgacgaaggtgctccgcaccgcggactgggtggacgagcacatccagcacgaccacctcgacatcgtcaccgcgttcgagaagggcgaccgggccgccgcccacgacctgatcgtcagccacagcgcgcacgcgaaggccaccatgtgccgcgccatcgaaaggagtgccgtcgcatga

SEQ ID NO: 11 - DNA, 1212 bp, Cupriavidus necator
atgctgacccagaaaacaaaagacatcgtaaaggccaccgcaccggtgctggccgaacacggctacgacatcatcaagtgcttctatcagcgcatgttcgaagcgcatcccgaactgaagaatgtgttcaacatggcccaccaggaacagggccagcagcagcaggcgctggcacgggcggtctatgcctatgcggagaatatcgaggacccaaacagtctgatggccgtcctgaagaacatcgccaacaagcatgcaagtctcggcgtcaaaccggaacagtaccccattgttggagaacacctactggccgccatcaaggaagtgttgggcaatgccgcaaccgacgacatcatttccgcttgggcgcaagcctacgggaatctggccgatgtcctgatgggcatggagagcgagttgtatgagcgctctgcggaacaacccggtggctggaaggggtggcgcacctttgtgattcgtgagaagcgccccgagagcgatgtgatcacgtcattcatccttgagcctgccgatggtggtcccgtggtgaacttcgaacccggacaatacaccagcgtcgcaatcgatgtgcccgcgctcgggttgcagcagattcgccaatacagcctgtcggatatgccgaacgggcgcagctatcgcatctcggtgaagcgcgagggcggcgggccgcagcctccgggctatgtttcgaacctgttgcatgatcacgtgaatgttggggatcaggtcaagctggctgcgccctatggaagcttccatatcgacgttgacgccaagacacccattgtcctgatcagcggtggcgttgggctgacaccgatggtcagcatgctcaaagtggcattgcaggccccaccgaggcaagttgtattcgtgcatggcgcacgtaacagcgcagtacacgcgatgcgcgacaggctgcgcgaagcggcgaagacctatgaaaaccttgacctctttgttttctatgaccaaccgctaccggaagatgtccagggacgggactatgattatccgggcttagtcgatgtgaagcagatcgagaaatcgatcctgctgccagacgccgactactacatctgcggtccgattccgttcatgcgaatgcagcatgatgccctgaagaatctcggcattcatgaggcacgcattcattacgaagtgtttggtcccgacctgtttgctgagtag

SEQ ID NO: 12 - DNA, 1212 bp, Cupriavidus necator
atgctgacccagaaaacaaaagacatcgtaaaggccaccgcaccggtgctggccgaacacggctacgacatcatcaagtgcttctatcagcgcatgttcgaagcgcatcccgaactgaagaatgtgttcaacatggcccaccaggaacagggccagcagcagcaggcgctggcacgggcggtctatgcctatgcggagaatatcgaggacccaaacagtctgatggccgtcctgaagaacatcgccaacaagcatgcaagtctcggcgtcaaaccggaacagtaccccattgttggagaacacctactggccgccatcaaggaagtgttgggcaatgccgcaaccgacgacatcatttccgcttgggcgcaagcctacgggaatctggccgatgtcctgatgggcatggagagcgagttgtatgagcgctctgcggaacaacccggtggctggaaggggtggcgcacctttgtgattcgtgagaagcgccccgagagcgatgtgatcacgtcattcatccttgagcctgccgatggtggtcccgtggtgaacttcgaacccggacaatacaccagcgtcgcaatcgatgtgcccgcgctcgggttgcagcagattcgccaatacagcctgtcggatatgccgaacgggcgcacgtatcgcatctcggtgaagcgcgagggcggcgggccgcagcctccgggctatgtttcgaacctgttgcatgatcacgtgaatgttggggatcaggtcaagctggctgcgccctatggaagcttccatatcgacgttgacgccaagacacccattgtcctgatcagcggtggcgttgggctgacaccgatggtcagcatgctcaaagtggcattgcaggccccaccgaggcaagttgtattcgtgcatggcgcacgtaacagcgcagtacacgcgatgcgcgacaggctgcgcgaagcggcgaagacctatgaaaaccttgacctctttgttttctatgaccaaccgctaccggaagatgtccagggacgggactatgattatccgggcttagtcgatgtgaagcagatcgagaaatcgatcctgctgccagacgccgactactacatctgcggtccgattccgttcatgcgaatgcagcatgatgccctgaagaatctcggcattcatgaggcacgcattcattacgaagtgtttggtcccgacctgtttgctgagtag

SEQ ID NO: 13 - DNA, 1182 bp, Burkholderia sp.
atgctgtcagccgaacatcgcgcaatcgtcaaggcaactgttccgctgctcgaaagcggcggcgaagcgctcaccacgcacttctacaagaccatgctggcggagtacccgagtgtgcgcccgctgttcaaccaggcgcaccagcaatcgggcgatcagccgcgcgcgctcgcgaatgcggtgctgatgtacgcgcgtcatatcgatcaactcgaacaactcggcggactggtttcgcagatcgtcaacaagcacgtcgccctcaacatcctgcccgagcattatccgatcgtcggcgcatgtctgctgcgcgcgatccgcgaagtgctcggagcggaaatcgccacggatgccgtgattgaagcgtggggcgccgcgtatcagcaactggccgacctgctgatcggcctcgaagagaacgtctacgtcgagaaggaaaccgcgacgggcggctggcgcggcacgcgtgcgttcgtggtggcgcgcaaggtcaaggaaagcgacgagatcacgtcgttctatctgcgtcccgccgacggcggcgagctgctcgaattccacccgggccagtacattggcctgaagctgatcgtcgacggtgaagaaattcgccgcaactattcattgtcggctgcggcaaacggccgcgaatatcggatcagcgtgaagcgcgagccgaacggcaaggcctcgaactatctgcacgactcggtgaatgaaggcgcgacgttggacctgctcacaccgtcgggcgacttcacgctggagcacaacgacaagccgctggtgctgatcagcggtggcgttggtatcacgccgacgctcgcaatgctgaatgccgcgctgcaaacgtcgcgtcccatccacttcattcatgccacgcgtcacggcggcgtgcatgcgttccgcgaccatatcgacgaactggcggcacgtcatccgcaactcaagcgcttctatgtgtatgagaagccgcgtcacgacgacgaggcgcatcacgcggaaggctatatcgacgaagcgcgtctgatcgaatggctgccggccacgcgtgatgtggatgtgtacttcctcggacccaagtcgttcatgcaggcggtgaagcgccatctgaagacgattggcgtgccggaaaagcagagccgttacgagttcttcggtcccgcttccgcgctcgattga

SEQ ID NO: 14 - DNA, 1023 bp, Burkholderia sp.
atgtccagctacaacattgcactgaattttgaagacggcgtgacccgctttgtcacatgcaaggcgggcgagaaggtgctcgatgctgcctttcgcgccaggatcaacctgccgatggattgctccgacggcgtgtgcggcacctgcaagtgccgcgccgagagcggacgctacgaccttggcgacgattacatcgaagatgcgctgaccgaggatgagaaggaaactgggctcgtactcacctgccagatggtgccgcaaagcgactgtgtgattgcagtaccggcatcgtccacggtatgcaagactgagcaaagcaggttcgccgcgaccgtggcgaagatcgaccagcacaacgatgcggccgttgttctcgaactggacgtggatgctgctgcgcccgttttcctcgcaggtcagtacatcaacatcgatgttccaggcagcggtcaatatcgctcatattcgttctcatccgcaccgggcgaatcgaaaatcagttttctgatcaagaagattcccggtggcgtcatgagcacctggctcgaatccgcacaacaaggcaacaaggtggagctagtcggaccgctcggaagtttctatctgcgcaccgtcgagcggccgttgctgtttctcgctggcggcacgggcctggctccatttctgtcgatgctggaagtgctggcgcgcgccgactcgcagcagacggtccacctcatttatggcgtgacccgcgacctcgacctggtgcaggttgatgccatcgaagcgtacaaggcgaagttgccgaacttcagctatgacacggttgtagccgatgcggattcgaatcatccgcgcaagggttgggtgacgcagcacatgccagctgagatcctgaatgagggtgatgtcgacgtttacctctgcgggccgccaccgatggtcgatgccgtgcgcaagtatttcgacgataacggcatgaagcccaacagctttcactacgagaagttcactccgaacgcagcgccgaggaccgtatga

SEQ ID NO: 15 - DNA, 1011 bp, Pseudomonas sp.
atgacacacaaggttgcactgaacttcgaagacggcgtcactcgtttcatcgatgctaatgctggcgagactgttgctgatgcagcctaccgccaaggcatcaatttacccctggactgccgagacggtgcatgcggcgcctgcaaatgcttcgccgagagcggccgctacagcctcggcgaggagtatatcgaggatgcacttagcgaagccgaagccgagcagggctacgtgctgacctgccagatgcgcgccgaaagcgactgcgtgattcgcgttccggccgcatcggacgtctgcaagacccagcaggccagctatcaggcagcgatcagcaacgtgcgtcagctgtccgagagcaccatcgcgctgtcgatcaaaagcgcatcgctgaaccagttggcgttcctgccaggccagtacgtcaatctgcaagtgccgggcagcgaccagacccgcgcctattccttcagctcgctgcaaaaggatggcgaggtcggcttcctgatccgcaacgtgccgggcgggctgatgagcagtttcctgaccagcctcgccaaggtcggcgatagcgtcagtctggctggaccgctgggcgcgttctatctgcgcgagatcaagcggccgctgctgttgctggcgggtggtaccggcctagcgccgttcaccgcgatgctggagaagatcgccgagcagggcagcgagcacccgctccatctgatctacggcgtcacccatgaccacgacctggtcgaaatggacaagctagaggcattcgccgcgcgcattcccaacttcagctacaccgcctgcgtcgccagcccggacagcgcctatccgcaaaagggctatgtgacccagtacatcgagcccaaacacctcaacggcggtgaggtagatgtctacctttgcggtccgccaccgatggtcgaggcggtcagtcagtacatccgggcacagggcatccagccggccaatttctattatgagaagttcgccgccagcgcctag

SEQ ID NO: 16 - DNA, 1218 bp, Neisseria meningitidis
atggagattattttaggtatcgtgatgtttaccgtcatcgttttggttttggcactgatgattctgtttgccaaatccaaactggtcagcgaaggcgacatcaccatcaaagtcaacggcgaaaaagagctgacgatgcccgccggcggcaaactcttgggcgcgcttgccaacgaaggcatctttatcccctccgcctgcggcgggggcggttcgtgcggacaatgccgcgtcgtcgtaaaaagcggcggcggcgacatcctgccgaccgagctgtcccacatcagcaaacgcgaagcacgcgaaggctgccgtctgtcgtgccaagtcaacgtcaaaaccgacatggacatcgaagtccccgaagaagtgttcggcgtgaaaaaatgggaatgcaccgtcatctccaacgataacaaagccacgttcattaaagaactcaagcttgccattcccgaaggcgaagaagtccccttccgcgccggcggctacattcaaattgaagctcctcctcacactgttgcctacaaagacttcgacattcctaaggaatatcacgaagactgggacaaatacaatttgtggcaatacgtttccaaagtggacgagccgattttgcgtgcctactctatggcttcgtatcctgaagaaaaaggcatcattatgctgaacgtgcgtatcgccacgccgcccccgcgcgtacctgatgcgcctccgggacaaatgtcgtcctacatctggtcgctcaaacccggcgacaaagttacgatttccggcccgttcggcgaatttttcgccaaagacaccgatgccgaaatggtatttatcggcggcggtgcgggtatggctccgatgcgttcccacattttcgaccagttgaaacgtttgaactccaaacgtaagattaccttctggtacggcgcacgttccaaacgcgagatgttctatgtcgaagactttgaccaactcgcggcagagttcccgaacttcacgtggcacgtcgccctgtccgacccgctgccggaagacaactgggacggctacacgggcttcattcacaacgtggtttacgaaaaccacctgaaaaaccacgaagcaccggaagactgcgaattttatatgtgcggccctccgattatgaaccagtccgtcatcaaaatgctcaaagacttgggcgtggaagacgaaaacatcctcttggacgatttcggcggttaa

SEQ ID NO: 17 - DNA, 1218 bp, Neisseria meningitidis
atggagattattttaggtatcgtgatgtttaccgtcatcgttttggttttggcactgatgattctgtttgccaaatccaaactggtcagcgaaggcgacatcaccatcaaagtcaacggcgaaaaagagctgacgatgcccgccggcggcaaactcttgggcgcgcttgccaacgaaggcatctttatcccctccgcctgcggcgggggcggttcgtgcggacaatgccgcgtcgtcgtaaaaagcggcggcggcgacatcctgccgaccgagctgtcccacatcagcaaacgcgaagcacgcgaaggctgccgtctgtcgtgccaagtcaacgtcaaaaccgacatggacatcgaagtccccgaagaagtgttcggcgtgaaaaaatgggaatgcaccgtcatctccaacgataacaaagccacgttcattaaagaactcaagcttgccattcccgaaggcgaagaagtccccttccgcgccggcggctacattcaaattgaagccccgccgcacaccgttgcctacaaagacttcgacattcccgaggaataccacgaagactgggacaaatacaatttgtggcaatacgtttccaaagtggacgagccgattttgcgtgcctactctatggcttcgtatcctgaagaaaaaggcatcattatgctgaacgtgcgtatcgccacgccgcccccgcgcgtacctgatgcgcctccgggacaaatgtcgtcctacatctggtcgctcaaacccggcgacaaagttacgatttccggcccgttcggcgaatttttcgccaaagacaccgatgccgaaatggtatttatcggcggcggtgcgggtatggctccgatgcgttcccacattttcgaccagttgaaacgtttgaactccaaacgtaagattaccttttggtacggcgcacgttccaaacgcgagatgttctatgtcgaagacttcgaccaactcgcagcagaattcccgaacttcacgtggcacgtcgccctgtccgacccgctgccggaagacaactgggacggctacacgggcttcatccacaacgtggtttacgaaaaccatctgaaaaaccacgaagcaccggaagactgcgaattttatatgtgcggtccgccaatcatgaaccagtccgtgatcaaaatgctcaaagacttgggcgtggaagacgaaaacatcctcttggatgatttcggcggttga

SEQ ID NO: 18 - DNA, 1029 bp, Burkholderia sp.
atgtccagctataacattgcactgaatttcgaagacggcgtaacgcgatttgtcgaatgcaaggcgggcgagaaggttctcgacgccgcctttcgcgccaagatcaacctgccgatggattgctccgacggcgtgtgcggcacctgcaagtgccgcgccgaaagcggcagctacgatctcggcgaggactacatcgaagacgcgctctccgacgacgaaaaggaaggcgggctcgtgctcacatgccagatggtgccgcaaagcgactgcgtgatcgcggtcccggcgtcgtccacggcatgcaagaccgcgcagagcaagttcgccgcgaaggtcacgaaagtggccccgcacaacgacgccgccgtcgtgctcgaactggacgtggatgccgccgcttcggcgccggtgttcctgccgggccagtacgtcaatatcgacgttcccgggagcggccagcatcgctcgtattcgttctcgtccgcaccgggcgaaacgaagatcagctttctcatcaagaagattcccggcggcgtgatgagcacgtggctcgaatccgcagagacgggcagcacggtggaactgaccggtccgctcggcagcttctatctgcgcgcggtcgagcggccgttgctgttcctcgcgggcggcacgggcctcgcgccgttcctgtcgatgctggaagtgctcgcgcgcgcgaactcgcagcagaagattcacctgatctacggcgtgacccgcgatctcgatctcgtgcaggtcgaagcgatcgaggcgtacacggcgaagctgtcgaacttcacgttcagcacggtcgtcgccgatgccgattcggatcatccgcgcaagggttgggtcacgcagcacatgccggcggaatcgctgaacgacggcgatgtcgatgtgtacctctgcggcccgccgccgatggtcgatgcggtgcgcaagcacttcgacgacaacggcgtgaagcccaacagcttccactacgagaagttcacccccaacgccgcgccggtgaccgcatga

SEQ ID NO: 19 - DNA, 1146 bp, Xylella fastidiosa
gtgccattattggccgaacatggcacaaccatcatcgaagccatgtaccatcgattgttcgaagatccgcagattgaggcgctgttcaatcaggcaaaccagaagaatggcactcaaatccatgcacttgctggagcgatactggcgtacgctcgcaatattgataacccaggtgtgcttgcatcagcgattgaaagaatctcacaaaagcatgttggttatgcaatccatccagaacattatcctcatgtcgcaactgctttactgggtgcgattaagcaagtcttgggtgacgttgccacatcagaagtgttggaagcctggggagaagcgtattggtttattgcaaatcttttaaaagatcgggaagcagtgattcgtgaggggatcatgaccaaaaacggtgggtggatccactggcggcgttttgtcatttccaagcgtattcctgaaagtgaaacgattacttcgtttatgctgcatcctgaggatggtgggccggttgtcccccatcaggccggacaatatcttacgttccgttttgatgcagccggcatgccgggtatgaaacgcaattactctatttcctgtggtcccaatagcgactattatcggattaccgttaaacgtgaacacggcacaggggcatcggctttcctacacgatcaagcgaaagttggaacgattatcgaatgtacgccgcctgtgggtgattttttccttcccagtgtgattgaaaggccaatcgttcttttatctggtggtgtcggattaacaccaatggtgagcatgatggagcagatcgctgaagcgcatcctgatgcgcaggtatggtatgtccatggtactcagaatcgagaaacacatgcgatggatgctcatattcgcgctttagtgagtcggcacaagcatatgaaagccacgacgttctatacacaacgtagtgaagccgatgatgcggaagccgggtttatcaccattgattggttgcgagccaatacaccgtttcaaaaggccgatttttacctttgtggcccgcgtcccttcttacgcacttttgttcgtgatctgatcggtgctggtgtgccagcagcacaggttcattatgaatttttcggtccgatggatgaagaaatggccgcataa

SEQ ID NO: 20 - DNA, 1146 bp, Xylella fastidiosa
gtgccattattggccgaacatggcacaactatcatcgaagccatgtaccatcaattgttcgaagatccgcagattgaggcgctgttcaatcaggcaaaccagaagaacggcactcaaatccatgcacttgctggagcgatactggcgtacgctcgcaatattgataacccgggtgtgcttgcatcagcgattgaaagaatttcacaaaagcatgttggttatgcaatccatccagaacattatcctcatgtcgcaaccgctttactgggtgcgattaagcaagtcttgggtgacgttgccacatcagaagtgttgcaagcctggggagaagcgtattggtttattgcaaatcttttaaaagatcgggaagcagtgattcgtgaggggatcatgaccaagaacggtgggtggatccactggcggcgttttgtcatttccaagcgtattcctgaaagtgaaacgattacttcgtttatgctgcatcctgatgatggtgggccggttgtccctcatcaggccggacaatatcttacgtttcgtttcgatgcagccggcatgccgggtatgaaacgcaattactctatttcctgtggtcctaatagcgaccattatcggattaccgttaaacgtgaacacggcacaggggcatcggcttttctacacgatcaagcgaaagttggaacgattatcgaatgtacgccgcctgtgggtgattttttccttcccagtgtgattgaaaggccaatcgttcttttatctggtggtgtcggattaacaccaatggtgagcatgatggagcagatcgctgaagcgtatcctgatgcgcaggtatggtatgtccatggtactcagaatcgagaaacacatgcgatggatgctcatattcgtgctttagtgagtcgacacaagcatatgaaagccacgacgttctatacacaacgtagtgaagccgatgatgcggaagccgggtttatcaccattgattggttgcgagccaatacaccgtttcaaaaggccgatttttacctttgtggcccgcgtcccttcttgcgcacttttgttcgtgatctgatcggtgctggtgtgccagcagcacaggttcattatgaatttttcggtccgatggatgaagaaatggccgcataa

SEQ ID NO: 21 - DNA, 1146 bp, Staphylococcus aureus
atgcttacagaacaagagaaagacattatcaaacaaacggtgcctttacttaaagagaaagggacagaaattacgtcaatcttttatccaaaaatgtttaaagcgcatcctgaacttttaaacatgtttaatcaaacgaaccaaaaacgaggcatgcaatcttcagcattagcacaagctgtaatggccgctgcggttaatatcgataacttaagtgttattaaaccagtcattatgccagtcgcatataaacactgtgcattacaagtttatgctgaacattatccaattgtgggggaaaatttattaaaagcaatccaagacgtgacaggtttagaagaacatgaccctgtgattcaagcttgggcaaaagcatatggtgttattgcggatgtgttcatccaaattgaaaaagaaatttatgatcaaatgatgtggattggttttaaaccattcaaaattaccaatattaaacaagaatctgaagacattaaatcatttacagttgaaactgaagaatatgactttagtgaatttacaccaggccaatacatcacagttgatgtttctagtgataaacttccatatagagctaaacgtcactattctatcgtatcaggtgaaaaaaaccatttaacttttggcgttaaacgtgatgtcacaacagaacatgaaggcgaagtttcaacaattttacacgatgagattaaagaaggcgatatgattaatttagctgcgcctgtaggtggattcgtattagagaatacgactgaaccacaacttttcttaggttcaggtattggcgtcacacctttagtagcaatgtatgaagctgcctctgccaaaggtttagatacacagatggttcaagttgctgaaaatgaacaacatttacctttcaaagacaacttcaacagtatcgcaagccattatgacaacgctaaattatatacacacttaaaagataaacaaggctatattggcactgaagaattacaagcatttttagcaaataaacctgaaatttatatctgtggtggtacaaaattcttacaatctatgatcgaagcacttaaatctttaaattacgatatggatcgcgtacactacgaaacatttattccaagactaagcgttgcagtataa

SEQ ID NO: 22 - DNA, 1011 bp, Dechloromonas aromatica
atgacctaccgaatcgccctgaatttcgaagatggcgtcacccgcttcatcgactgcaagcccactgaaaccgtggccgatgccgcctaccgccaaagtatcaatgttcccatcgattgccgcgacggcgcctgcggtgcctgcaagtgctcctgcgaatccggcagcttccgcctcggcgaatatatcgacgatgccctgagcgccgacgaagccgcccaaggcatggtcctcacctgccagatgtacccgcaaggtgactgtgtcgttcgcgttcccgcctcttccgatgtctgcaagaccaagcaggccagcttcaacgccacgatttccgacctgcgccagctctccgacagcacgatcagcctgaccctgtccggcgaagcactcaacaagctggccttcctgcccggccagtacgccaacctggcggtacccggcaccccgcagcaccgcgcctactcgtacagttcgatgccgaaggagggcagcgtttccttcctgatccgcaatgtaccgggcggcctgatgagcggctacctgcgcgaacaggccaaggccggcgacagcatcacgatggccggtcccctgggcagcttctacctgcgcgaaatcaagcgcccggtcctcatgctggccggtggcaccggcctcgcccccttcctcgccatgctcgacaaggtggtggccgacggcggtagcgcccacgccatccacttgatctacggcgtcaacaccgacaccgacctggtcgaactcgacaaactcgccgccttcgccgccacgctgcccaacttcacctacgccctggtcgtcgtcgccgccgacagcgcccaaccgaaaaagggctacgttacccagcacattgagccggcccagctgaacgatggcgatgtcgacatctatctctgcggtccaccgccgatggtcgaggcagtcgcccaaaacctgcgtgagcgcgccatccagccggccagcttccattacgaaaaattcgccgccagcgtttga

SEQ ID NO: 23 - DNA, 1050 bp, Dechloromonas aromatica
atggctcgtatcatcatgcaaccctccggcaagtccgttgattgcgcctatggcgataccgttctgatggcgctcgaaaaggccggctatgccctgcccaacaactgccgcgccggcgcctgcggcgaatgcaaggtcaaggtcacccaaggccagttcgaccagggcatggtgctcgacatggccctctcgcaggacgagcgcaagcagggcttcggcctgatgtgcatggccaaaccgatttccgaggagctgaccatcgaatggggcaccgaggatgcgaagcccaaactcttccccccgcgcgaagatgcgctgttcgtcgtcaccgacaagaagcagatcgccgcccgcgtcgtcgagctgcgcctgcgcccggtcggccagccgatccgctactggcccggccagtacgtcacgctcggcaacccgcgcgccgacattccggcccgcgcctattccatttccaacgccccccgtcccgacggcgaactggtgctgcaagtcgcccgtgccgacagcggcgtgaccagcaactgggtccacgacaccctgcaggccggcgataacgtcaaggtatccggcgcctacggcactttcatcggcgacccctcggtcgataccccggtcctctgcatcgccgccggcaccggcctcgcccccgtgctggcgctggccgaagccgccctgcgccgtggtttcaagaagccggtgaccatgctcttctcggcccgcaccaaggaagacgtttacagccagggcatgatggcctggtggcggaccaagcatcgcaatttcgactacaaggtaacgttgacccgcgaagaagccgacggcttcctgaaaggccgcgtcgacgtcgtgctgccgcaactgttcaaggacctgtccaagcacaccatcttcatcgccggcagcccggagttcgtcgatagctgcgtcgctgccgccaaggcccagggtgcattggatgaactgatccacaccgaaggcttcttcgcccagcagcagccggtggtggccgacgccgaccatctgctgccgctctaa

SEQ ID NO: 24 - DNA, 1179 bp, Pseudomonas putida
atgctcaatgccgaacaacgtgcaatcatcaaggccactgtacctctgctggaaagcggcggcgaagcgctgaccacccacttctacaagatgatgctcagcgaataccccgaggtacggccgctgttcaaccaggcccaccaggccagtggcgatcagccgcgtgcgctggctaacggcgtgttgatgtatgcccgccatatcgaccagctggagcaactgggcggcctggtcgggcagatcatcaacaagcatgttgccctgcagattctgccggagcactacccgattgtcggaagctgcctgctgcgcgccatcgaggaagtgctgggcaaggacattgccacccctgcggtgatcgacgcctggggcgcggcctatggccagctggccgacattctgatcggcgctgaagaaaacctctataaagagaaggaagaggccgagggtggctggcgcggtacccgtgaattccgcctggtacgccgcgagcaggaaagcagcgagatcgtttcgttctacttcgccccggtggatggcatgccggtgctcaaggcagaacctggccagtacatcggtctgaaactggacattgacggtgccgagcagcgccgcaactattccctgtcggcgctgtgcgacggcaaggaataccgcatcagcgtcaagcgcgaggcgggcggcaaggtctccaactacctgcacgatgagctgaaggtgggcgataccctgcaactgttcccgcctgcgggtgacttcaccctggcagccagcgacaagccgctggtgctgatcagcggaggggtgggcattaccccgaccctggcgatgctgcaggcagcactgcaaacccggcgcgaggtgcatttcatccactgtgcgcgtaacggcgcggtgcatgccttccgggactggatcgatggcctggcggcgcgccatccacagctcaagcgcttctactgctatgccgagccggaaggtggcgctgcggccgacgccgtgggtttgctcagtgaagacctgctcgccgagtggctgccgcaggagcgtgacgtggatgcctacttcctcgggcccaagggcttcatggcggcggtcaagcgccagctgaagggcctgggggtgccggagcagcagagccgctacgagttcttcgggccggcggcagcgctggagtga

SEQ ID NO: 25 - DNA, 1194 bp, Xylella fastidiosa
atgtctgcatcattttcgccacatacaattacacttataaaatctacagtgccattattggccgaacatggcacaaccatcatcgaagccatgtaccatcgattgttcgaagatccgcagattgaagcgctgttcaatcaggcaaaccagaagaacggcactcaaatccatgcacttgctggagcgatactggcgtacgctcgcaatattgataacccaggtgtgcttgcatcagcgattgaaagaatcgcacaaaagcatgttggttatgcaatccatccagaacattatcctcatgtcgcaaccgctttactgggtgcgattaaaaaagtcttgggtgacgttgccacatcagaagtgttggaagcctggggagaagcgtattggtttattgcaaatcttttaaaagatcgggaagcagtgattcgtgaggggatcatgaccaagaacggtgggtggatccactggcggcgttttgtcatttccaagcgtattcctgaaagtgaaacgattacttcgtttatgctgcatcctgaggatggtgggccggttgtcccccatcaggccggacaatatcttacgttccgtttcgatgcagccggcatgccgggtatgaaacgcaattactctatttcctgtggtcccaatagcgaccattatcggattaccgttaaacgtgaacacggcacaggggcatcggctttcctacacgatcaagcgaaagttggaacgattatcgaatgtacgccgcctgtgggtgattttttccttcccagtgtgattgaaaggccaatcgttcttttatctggtggtgtcggattaacaccaatggtgagcatgatggagcagatcgctgaagcgcatcctgatgcgcaggtatggtatgtccatggtactcagaatcgagaaacacatgcgatggatgctcatattcgcgctttagtgagtcggcacaagcatatgaaagccacgacgttctatacacaacgtcgtgaagccgatgatgcggaagccgggtttatcaccattgattggttgcgagccaatacaccgtttcaaaaggccgatttttacctttgtggcccgcgtcccttcttgcgcacttttgttcgtgatctgatcggtgctggtgtgccagcagtacaggttcattatgaatttttcggtccgatggatgaagaaatggccgcataa

SEQ ID NO: 26 - DNA, 1611 bp, Rhodococcus sp.
gtgagctttcaggtggcattgagcttcgaggacggggtgacccgcttcatcaagtgcggaccgaacgagacggtcgccgacgcgtcgtacaaggcgcggatcaacattcctctcgactgccgcgacggcgcgtgcggtacctgcaaggcactgtgcgagtccggcaactacgacggcggcgactacatcgaggaggcgctgaccgacgacgaggccgagcagggattctgcctgccgtgccagatggtcccggaatccgatctcgtgctgcagatcgcgacgacctcggacgtcgcgaagaccgcggccgcgacgtacacggcgacgatcacggacctgcagcggttctctcccagcaccgtgggcttcaccgtcgagatccccaatcgggacgacctggtgttcctgccgggccagtacgtgaacatcaccgtgcccggaacggaacagacccggtcgtactcgttcagcacgggaccgaacgacccgcagttgtccttcctggtgaagatcaccgagggcggcctgatgtccgagtacctgagtgatcgcgcccaggtgggagacaccctgcagttcaccggcccgttcggcagcttcttcctgcgtgagcgtaagcgccccgccctcctgctcgccggcggtaccggcctcgcgccactgctcgccatcctgtcgaagatgcaggaggagggcagcgacctgccggtgcacctggtctacggcgtcagcttcgaccaggacctggtcgagctggacaagctcgaggcctacacgcggtcgctgccgaacttcacgttcgactactgcgtttccgatccggagtcgaccgcccccaacaaggggtacgtcaccggcctgttcgagccgaagcacctcaacgacggcgacgtcgacgtctacctgtgcgggccgccgccgatggtcgaggcggtgcgcacgcacctgtcggacgagggcatctcggtgacgaacttctacttcgagaagttcaacaactccgcgacccccggcgccgccgaaccggcgccccggcccaccgagcgggaactcgaagccgccaccagggcagccgaggagaccggcctgccggtgtccctcggcgccgccgagcaggtgccggtgggcaactacgagatcggcgaggagcacccgcccgtcaccgaatccgacgcccagttcgacgcgcgcatggcgctcgaactcggtgcgctggagctgaccatcggccggctcaccgacgcgcagctcgtggaattccggattctcgccgaggcgtcgaccgcgtcgatcgaccacgaccgcttcaccgacgcgggcgcgttcaccgacaccaacgccgccttccacgagttcctgttccgctgctgcggcaatcccgtgctgctcgaggcgtacaaccggctcgaggtgacccagctgatgcgcaaggtgctgcgcaccgcgcagtgggtggacgagcagattccgcacgaccacctgcagatcgtgcgggcgttcgaacgcaaggatcgcgcggcggcccgcgacctcatcgtcagccatgccgagcacgccaaggcgacgatgcgccgcgccatcgaggagtccgcgaaggtggaactcgcgtga

SEQ ID NO: 27 - DNA, 1515 bp, Cryptococcus neoformans
atggacgccaagaaggctactatcgctatcattgcccttgctgccgctgctaccgcctacaaagtcatgagtactactcaagaaaagaagaataccgaaggtgtctgccctgccaccggccagaagcgtgctggttctaccggatgccccttcagctcggggctgcctttgcctgaccctggtcaccgatgtgaccctaactctatccaggaagagtacaaggtccccgaagtgcctcctcttaccgaggcgcagaaggacatcatcaaatctactgctcctatcctcgagcaacatggtgtcaccataactactcatttctacaagaacatgattcgtgcccaccccgagctgagagacgtcttctcagagagcgctcaaaaacttggccaccagcctgccgctcttgccgctgctgtttatgcctacgcttgcaacatccacgatctcactcctatccttcctgtcgtcgagcgaatcgcccacaagcacacttctctccatattactgccaaccaatacggtattgtcggcaagcacttgatccaggctattgttgacatcctcggtgatgccgtgactcccgaggtcggtgatgcctggtacaatggttattggaatttggcccatgtcttcatcaagcgggagcgtcaactttatgattctgctatcgaagctggtggctgggaaggatggaggcaattcaaggtcgccaagcgagtcaaggagtccaacgagattactagcttctacctgaagcctgttgaaggatccggcgcgcctttgcccaagttccggcctggtcagtacactgctgttcagattgatattcccggtttaggctacaagcaagctaggcagtattccctctctgacgcccctaatggagagtatttccgaatctctgtcaagcgggaagatggagtgcctgtacctacactttctaaccctgaagttcccttccaccctggatggatgagtaacgttcttcataaagactaccaagaaggctcaatcgtcaacgtcgcctcgccattcggtgatttctattatgcaccctccgattcctcgcccactgccccgcttgtcctcctttcggccggcgtgggtcaaacacctgtcatggccatgctcaacgcccagctcgccaagaacaatgagcctaactcccctatcaagcctataacttacgttactgtcgccaggagtcctaaagttcgtgcgttcaaggaccatgtaaagaagctttcagatgtgcatgagaatgtgaagagtagaatattctactcgagaccgacggatgacgtggtagaggggcaggactatgatttcaagggtaggatggatcttgagaagatcaaagaggacttgtatttgggagataagacggccgagtactacatctgcggtccttccaagttcatgctcaacacaagggacaagctccaatctctcggtgtcgacccctctcgaatccactatgagctattcgaggctggtaatctttctgcttag

SEQ ID NO: 28 - DNA, 1194 bp, Xylella fastidiosa
atgtctgcatcattttcgccacatacaattacacttataaaatctacagtgccattattggccgaacatggcacaactatcatcgaagccatgtaccatcgattgttcgaagatccgcagattgaggcgctgttcaatcaggcaaaccagaagaacggcactcaaatccatgcacttgctggagcgatactggcgtacgctcgcaatattgataacccgggtgtgcttgcatcagcgattgaaagaatttcacaaaagcatgttggttatgcaatccatccagaacattatcctcatgtcgcaaccgctttactgggtgcgattaagcaagtcttgggtgacgttgccacatcagaagtgttggaagcctggggagaagcgtattggtttattgcaaatcttttaaaagatcgggaagcagtgattcgtgaggggatcatgaccaagaacggtgggtggatccactggcggcgttttgtcatttccaagcgtattcctgaaagtgaaacgattacttcgtttatgctgcatcctgaggatggtgggccggttgtcccccatcaggccggacaatatcttacgtttcgtttcgatgcagccggcatgccgggtatgaaacgcaattactctatttcctgtggtcctaatagcgaccattatcggattaccgttaaacgtgaacacggcacaggggcatcggcttttctacacgatcaagcgaaagttggaacgattatcgaatgtacgccgcctgtgggtgattttttccttcccagtgtgattgaaaggccaatcgttcttttatctggtggtgtcggattaacaccaatggtgagcatgatggagcagatcgctgaagcgtatcctgatgcgcaggtatggtatgtccatggtactcagaatcgagaaacacatgcgatggatgctcatattcgtgctttagtgagtcgacacaagcatatgaaagccacgacgttctatacacaacgtagtgaagccgatgatgcggaagccgggtttatcaccattgattggttgcgagccaatacaccgtttcaaaaggccgatttttacctttgtggcccgcgtcccttcttgcgcacttttgttcgtgatctgatcggtgctggtgtgccagcagcacaggttcattatgaatttttcggtccgatggatgaagaaatggccgcataa

SEQ ID NO: 29 - DNA, 1095 bp, Xanthomonas campestris
gtgcgtatagtgcaccccatgaactcggctcctgctcgcatgcccaagtccccgctgcccacgcgcctggcgcgccggctggtgtcgccccagctgttcgacttctgggcgacccggatcaacccgttgtggaccctggagcgcccgatggcgcggctggtcgcacgcacgccagccagccgggatgcagtgaccttgctgttccagcccaatgggcattggcagggcctgcaggccggccagcacgtcagcatcggcgtggaaatcgacggccgccgcctgctgcgcagctacagccccacggtgctggccgacggccgcctggcgatcaccgtcaaggcgatcaccggcgggctggtcagcacgtatctggccggtgaggcgccgctgggtgcggtggtctcgctggatccggccttcggcgacatgctgctgcccacaacgcccgcacctctgttgctgttggcagctggcagcggcatcacgccgatgcgcgcgctgctgcaggccgccgctgcggcaggcatgccgatggacgtggacctgctgtattgggtgcgccagcgcgacgaggcctgctttctggacgaattcgaagcgctggcggccgcgcatccacgcctgcgcgcgcaactgctcaccacccgcgaaggcgccgcacctgcgccgcggatcgacagcttcccgctggagcaggtcaccgccctgcaggaccggcatgtgatggcctgcgggccgggcggtttcgtgcaggccgcgcgcgcgcgcttgcaggaccgtgttgcccgattccaggccgaagccttcagcgtgccggtactggacgacggcgaagccggccaagtgcaggtccagctgtcacgcagcggccgtacgctgaccctttcgcgcggccagtcgctgctggaagggctggaagcccagggcctgcgtcccaaacacggctgccgcatgggcatctgcaacagctgcgcgtgtgcgcgccagtccggcaccacgcggcacctgctgaccggcgagcgcagcagcgaacccaccgcacaggtacgcctgtgcatcagcgccgccagcaccgacctgatcctggatctgtaa

SEQ ID NO: 30 - DNA, 423 bp, Campylobacter jejuni
atgacaaaagaacaaattcaaatcatcaaagattgtgtgcctattttgcaaaaaaatggagaggatttaaccaatgagttttataaaataatgtttaatgattatcctgaggtaaaacctatgtttaatatggaaaaacaaatttcaggagaacaaccaaaagctttagcaatggcgattttaatggcggctaaaaatatagaaaatttggaaaatatgagaagctttgttgataaagttgccataactcatgttaatttaggagttaaagaagagcattatcctatagttggagcttgccttttaaaggctattaaaaatcttttaaatcctgatgaagccactcttaaagcttgggaagttgcttatggaaaaattgctaaattttatatcgatatagaaaaaaagctctatgataaataa

SEQ ID NO: 31 - DNA, 429 bp, Campylobacter coli
atgacacaagaacaaattcaaattatcaaagattgtgtgcctattttacaaaaaaatggagaagatttaacaaaagaattttataaaataatgtttaatgactatcctgaagtaaaacctatgtttaatatggaaaaacaagcatctggagaacaaccaaaagccttagctatggcaattttaatggcagctaaaaatatagaaaatttagaaaatatgagaagctttgttgataaagtagctataacccatacaaaattaaatgttaaagaagagcactatcctattgtgggggcttgtcttttaaaagctatcaaagtagtattatatgcagatgaaaccacactaaaagcttgggaagaagctaacaaagctatcgcacaattttacatagacattgaaaaagaaatttatgcaaaagctaagtaa

SEQ ID NO: 32 - DNA, 435 bp, Clostridium perfringens
atgttagatcaaaagacaatagatataataaaaagtacagtaccagttttaaaatccaatggattagaaataacaaaaactttctataaaaatatgtttgaacaaaatcctgaagtaaaacctttgttcaatatgaataaacaagaatctgaagagcaaccaaaagctttagcaatggcaatattagcagttgctcaaaatatagataacttagaagctataaaacctgtagttaatagaataggagttatacactgtaatgcaaaagttcaaccagaacattatccaatagtaggtaaacacttattaggagcaataaaagaagttttaggtgatggtgcaactgaagatattatcaatgcgtgggctaaaacatatggagttatagctgaagtatttataaataatgaaaaagagatgtatgcttcaagatag

SEQ ID NO: 33 - DNA, 747 bp, Clostridium perfringens
atggaaaatgtttggaatggatttagacaattagaaatatttaaaatagaagaagaggcaaaggatataaaatcattttacctaagagctactgatggtaaaccattaaaagaatataaatgtggtcaatttttacctcttaaaatagaaactgatgatgaagttataaaaaaagaaatgagaagatatagtttatcaggtgatcccaaaaagaattattatagattaacaataaaaagggtgcctaatggaaaggtaagtggatattttcatgaatctattaatgtaggtgatacaatattagcaatgcctccatttgggaattttacattaacagaagatagtaataagcctttagttttactatcaggaggtataggaataacacctattttatcaatgctatatggagctaaggaacaaagcagagatatatactttgtggaagctgtattaaactcagataatctagctttaaattcagatgttcaaggaattaaaaaagtaaagaattttaaggaaataaagatatttagtgagccattagaaagtgatataaaaggtaaagattttgatgaagagggatttataacaaaagaatggataaaaaataacttgcctttaaatggagaatttttcttttgtggtccaactttatttatgaaaagtataagaaatagtttaaaagatttaggcgttaaagaagataatattaattttgaattctttggaaaagaagagttttaa

SEQ ID NO: 34 - DNA, 1215 bp, Corynebacterium efficiens
ttgatcggggtttcccgccccactccccagaattcctaccccggaggttccaccgtgatcgtctcgaccaagcccttgaccgaccgcagcaggctgtccgaagcccacgccgagatgatcaaggcgaccctgcccctggtcggcagcaagatcaacgacatcacccccgtcttctacaaccggatgttcaccgcgcacccggaactgctccgcagcaccttcaaccgcgccaaccagaagcagggtgatcagcagaaggcactggccgcctccatcgcaaccttcgccaccatgcttgttgatccagaggcaccggaccccgtggacatgctcgcccgcatcggccacaagcacgtctccctcggcatcaccgccgaccagtacaacatcgtccatgagcacctgttcggcgccatcgtcgaggtgctcggcgcagacgtggtcaccccaccggtcgccgaggcctgggatgccgtctactggctcatggccaacgtcctcatcgacctggagagcgacctctatgcctccaacgacctcgccccgggtgatgtgttccgccacgtcaccgtcactggtaagaagcagctcagcgacaaggtctgggagtacaccttcgaaggcgacctcgtcaccccggcgccgggccagtacacctccatcggcgtaaagcttcccgacggcgcacgccaactccgccagtactcactgctcagcggcaccgacagccagtaccgcatcgccgtggaggacaacggtgaggtctccaccttcctgcgggacaacgtggaggtcggcgacaccatcgaggccagcgtcgccgccggtgacctggtcatgaacgatgatgtcaacccggtggtcctcatctcccagggcatcggctccaccccgatggtgggcatgctcaaccaggtcgccgccgaccgccacgtcaccgtcctgcacgccgaccagtccgagaaggatcacgcccagcgtgaggagatggtcgcgctggtcgggggcctggccaacggtgccctctacaccttctaccgcgatgccgaccagtggctcaacgttgccggccacatcccctccgatgcctccgtctacctctgcggtggcaacgaattcctgcagaatgtccgcggccagctggaaaacctggaggagcagccccgagagatccgcttcgagctcttctccccgaatgactggctgatctcgtag

SEQ ID NO: 35 - DNA, 1185 bp, Vibrio vulnificus
atgctcagcgaaaacaccattaacattgtaaaatccaccgcccccctgttggccgaaacaggaccaaaactgaccgcccatttctaccaacgtatgtttgagcacaaccctgaactcaaagatatatttaacatgagcaaccaacgcaatggtgaccaacgagaagcgttgttcaacgccatctgcgcctacgccagcaacattgacaatctgcctgcactcttaggcgcagtggaaaaaatcgctcacaagcactccagctttttgatcactgccgatcaatatcaaattgtcggcagtcacttgctagcaaccatcgatgaacttttttctccggggcaagccgtgctcgatgcctgggctgaagcttatggtgtgctggcgaatgtcttcattcagcgagaagagcaaatttatcaagccaaccaatcacaaaccggcggctggcgtggcttgcgagagtttgaactggtcgaaaaacaatacgagagtgcacacatctgtagctttgtcttcaagcccgtggatggcggctctgtcgttagcttcaaaccagggcaatatttagggatttacatcaacgatgagcagtttgaaaatcaagaaattcgccaatacagcttgtcatcctctgtacgtcctgattgctatcgcatttcggtgaaacgtgaagaaggcggccgagtctctaactatctgcacgatcatctcgacgttggcagcaaagtcaaactcgcagcgcctgccggtgactttttccttgatgccgcgccaacggcaccagtcgtgcttatctctgcgggtgtcggcctcacgccaacactttctatgcttgaaagcctcaccgagcatcaagcgccggtgacttggattcatgcaactgaaaatggccaacaacacgcatttaaacaacacgtcaaacaattggttgaaacgcatccgcatttcaattcgttagtttggtacaaccaaccaaactcagacgataaaatcggtgacgatttccagttcagtggatgggtgaacctgcatgagattgaaaccgtcctcaaacaggcagatgtacaagtgtacttctgcggccctgttggctttatgcagtttatcgccaaacaattgcttgagatgggagtgcctgaacaacagttccattacgaatgttttggcccacacaaagtggtttag

SEQ ID NO: 36 - DNA, 1161 bp, Corynebacterium glutamicum
ttgatcgtttccacccagcccattactgatcgcagcgcactctcggcagaacacgcagaggtgatcaaagcaacgcttcctctcgtgggcggcaagattaatgagatcacgccggttttctacaacaagatgtttgcggctcacccagaattgatcgctaacaccttcaaccgtggcaatcagaagcaaggcgatcagcagaaggcgctggcggcttcgattgcaacgtttgccaccatgctcgttactcctgatgctcctgacccagttcagctgctgtcccgcattggccacaagcacgtgtccctcggcattactgctgatcagtacgacattgttcacgagcacctgttcgccgcaatcgttgaggttttgggagcggaaactgtcaccgcacctgtcgctgaagcctgggatgctgtctactggatcatggcaaatgtgctgatcggttttgagaacaacctttatgcttccaacgatctggagcctggcgacgtcttccgcgaagtcaccgtgaccgcgaagaagcagctcagcgcaaccgtctgggaatacaccctggcaggtgagctggttgccccagagccaggtcagtacacctccatcggagtagtgcttgacgacggcgcccgccagctgcgccagtacagcttgctcggcggctccgacaccgagtaccgcattgcggttgaggataacggcgaggtttctggattcctgcgtgatcgcgtatccgttggtgacaagattgaagccaccatcgcggccggcgacctggttcttaacaaggacaccaatccagttgtgctgatttcccagggcatcggctccaccccaatggtgggcatgctcgcaggtatgaaccctgaacgtgacgttgtggttttgcatgctgaccaggccgagtccacctacgcgcaggtggaggaagtgcaggggctcgtcgaaaagctccctaaggctgcgtttgaaatcttctaccgcgacaacgaccagtggctcgaggtcgctggccgcattccatcaggtgcgtccgtgtacctgtgcggtggcgtggaattcttgaagaacgtgcgtgagcagatcgaggcgctcgatgagcagcctcgcgacgtaaacttcgagctcttcgcaccaaacgactggctgatttcctaa

SEQ ID NO: 37 - DNA, 1191 bp, Shigella flexneri
atgcttgacgctcaaaccatcgctacagtaaaagccaccatccctttactggtggaaacggggccaaagttaaccgcccatttctacgaccgtatgtttactcataacccagaactcaaagaaatttttaacatgagtaaccagcgtaatggcgatcaacgtgaagccctgtttaacgctattgccgcctacgccagtaatattgaaaacctgcctgcgctgctgccagcggtagaaaaaatcgcgcagaagcacaccagcttccagatcaaaccggaacagtacaacatcgtcggtgaacacctgttggcaacgctggacgaaatgttcagcccggggcaggaagtgctggacgcgtggggtaaagcctatggtgtactggctaatgtatttatcaatcgcgaggcggaaatctataacgaaaacgccagcaaagccggtggttgggaaggtactcgcgatttccgcattgtggctaaaacaccgcgcagcgcgcttatcaccagcttcgaactggagccggtcgacggtggcgcagtggcagaataccgtccggggcaatatctcggcgtctggctgaagccggaaggtttcccgcatcaggaaattcgtcagtactctttgactcgcaaaccggatggcaaaggctatcgtatcgcggtgaaacgcgaagagggtgggcaggtatccaactggttgcacaatcacgccaatgttggcgatgtcgtgaaactggtcgctccggcaggtgatttctttatggctgtcgcagatgacacaccagtgacgttaatctctaccggtgttggtcaaacgccaatgctggcaatgctcgacacgctggcaaaagcaggccacacagcacaagtgaactggttccatgcggcagaaaatggcgaagttcacgcctttgctgatgaagttaaggaactggggcagtcactgccgcgctttaccgcgcacacctggtatcgtcagccgagcgaagccgatcgcgctaaaggtcagtttgatagcgaaggtctgatggatttgagcaaactggaaggtgcgttcagcgatccgacaatgcagttctatctctgcggcccggttggcttcatgcagtttaccgcgaaacagttagtggatctgggcgtgaagcaggaaaacattcattacgaatgctttggcccgcataaggtgctgtaa

SEQ ID NO: 38 - DNA, 1191 bp, Escherichia coli
atgcttgacgctcaaaccatcgctacagtaaaagccaccatccctttactggtggaaacgggaccaaagttaaccgcccatttctacgaccgtatgtttactcataacccagaactcaaagaaatttttaacatgagtaaccagcgtaatggcgatcaacgtgaagccctgtttaacgctattgccgcctacgccagcaatattgaaaacctgcctgcgctgctgccagcggtagaaaaaatcgcgcagaagcacaccagtttccagatcaaaccggaacagtacaacatcgtcggtgaacacctgttggcaacgctggacgaaatgttcagcccggggcaggaagtgctggacgcgtggggtaaagcctatggcgtcctggctaatgtatttatcaatcgcgaggcggaaatctataacgaaaacgccagcaaagccggtggttgggaaggtactcgcgatttccgcattgtggctaaaacaccacgcagcgcacttatcaccagcttcgaactggagccggtcgacggtggcgcagtggcagaataccgtccggggcaatatctcggcgtctggctgaagccggaaggtttcccgcatcaggaaattcgtcagtactctttgactcgcaaaccggatggcaaaggctatcgtattgcggtgaaacgcgaagagggtgggcaggtatccaactggctgcacaatcacgccaatgttggcgatgtcgtgaaactggtcgctccggcaggtgatttctttatggctgtcgcagatgacacaccagtgacgttaatctctgccggtgtcggtcaaacgccaatgctggcaatgctcgacacgctggcaaaagcaggccacaccgcacaagtgaactggttccatgcggcagaaaatggcgatgttcacgcctttgccgatgaagttaaggaactggggctgtcactgccgcgctttaccgcgcacacctggtatcgtcagccgaatgaagccgatcgcgctaaaggtcagtttgatagcgaaggtctgatggatttgagcaaactggaaggtgcgttcagcgatccgacaatgcagttctatctctgcggcccggttggcttcatgcagtttgccgcgaaacagttagtggatctgggcgtgaaacaggaaaacattcattacgaatgctttggcccgcataaggtgctgtga

SEQ ID NO: 39 - DNA, 1185 bp, Thermobifida fusca
atgctgtcaacccagtccgccgacatcgtccgcgccacgctgccggtcgtcggggcccacctcgacgagatcacctcccgcttctactcgacgatgttctccgagcgccccgaactcctcgacggcctgttcaaccggggaaaccaggccaacggggaacagcgccgggccctcgccggatccatcgccggattcgctagcgcactcctcgccaaccccgacgaacgccccgacgcgctgctcgcccgcatcgcgcacaagcacgccgccgtcgcggtcaccgacgaccagtacgtcatcgtgcacaaatacctgttcggggcgatcgccgacgtcctcggcgacgcagccacccccgaagtcatcgccgcctgggacgaggtgtactggctcatgggcggcgcgctgatcgcgctcgaagcccgcctctacgcggagaagaacgccgacaacggccgcacctggcgggaatggaccatcgtggaccgccgcgaagagacccccgacgtgttctccctcgtcctgcggcccagcgacggcggccccctccccgaagcgcggcccggccaatacgtcagcgtgctccaccgcatgccggacggtatccgtcagatccgccagtactccatctccggcggcgacgagcacacccggcgcatcaccatcaaacgggtccgcggcacagaacacacccctgaaggggagatgtccgccctgctgtatgcaaccgccaaagcaggggacaccctcaccgtctccgcccccttcggagacgtcgtcctcaccgacagcgaccggccgctcgtgttcgccaccgcgggaatcggctgcactcccatcgtcggcatgctcaactacctcgccgccaccggcgccacccggcggatcctggccctgcacgccgaccgctcccgcgccgagcacgcgctgtggcaggaaacctccaccctgatcgcgcgcctgccccacgcccagtacgtcgtctggtacgaggaaggagacggcggcctgcccgggcagatggacctcaccgggctggagatccccgcggacgccgaggtctacctgtgcggaccgctgcccttcatgcgggagatccgcacccagttcctcgccgccggagtgcccgccaaggacatccactacgaagtgttcggcccggacctgtggctgcccgctgactga

SEQ ID NO: 40 - DNA, 2025 bp, Microbulbifer degradans
atgaaacggttacaaccttcccagtttcaccaagcagaaaaggcagtacagaaacgtttgggcgtggctgacatggtagcacagcacagcgaagggtacattcgctccactatgcccggtcagcaccgagatttctttacaaatcttcccatggtgatagtgagcatcacagacttcgacggcttcccatggcctataccattgcatggaaagcctggttttattaaatcacccaatgcaaatacactcgaaatagaaacctaccccacacttaaggacgtgctaaaacttaactttaaaaaaagtcaaaaaataggcattcttggaattgagctgcatacacgccgtcgcaatcgtatgaatggcacaattaaagagataaacaacaacagcttcttagttatatgcgaacaaagttttggtaattgccctcaatatatccaaaagcgtgagttacactgggtcgatacgcctcaaaagtgtttgcaaacagaagatatttttttaacgaatacactaacttcgacctgtgcagaatggattgaatcctcagatacattttttattagctcccgaaccaaacgtctttctaccgataaacgtgacggcctagatgtttcccatcgaggaggaaaaccaggattcgtaaaagttgaaaacgacactttatatttcccggattttagtggtaatcagttttttaatacacttggtaatatacaatctgacagccgagtgggcttatatttccccgattatgaaagtggaaaaattatacttatatcgggtacagctaaaattatctgggataaagaattaactagaatatttgaaggagcagaacgaattatttctgtaaaggtacgcaattgccttattctcgacagttttcttcccatgcgaggcgtgcttaccgagctttcgccatcactgatacgcacaggcacatgggaaaatcctcaagaaaaaagcgcagctagagtatataagcagtttaaaataataaagaagataaaggaaagccgtgacgttacgtcgttttatattaggcctctagatggcagcgcgttaagttcttatctaccaggtcaatttttacctattagtatcaagcaaccccatacatcatctacctgcctgcgaacgtacacactgtcacaagcaccactaagcaacgcttatcgcttttccgttaaacgtgaaaaatttggcctagcatctcgtatattacacgacaccattaacaccggcgatagtctttatgtaagtcaacccgaaggaaaattcacattacaaaccaacaaaaaaacaaatgttttattgtcagccggtattggtattacgccaatgatagccatgctgcaagggctaattcgagaagtagaaaaaggtgaaaaaccacaagatgtatattttattcatagcacccagaattcagagacacatacatttgcaaatgaactaaaacacctcaacaaacgacacaaatggctacaactctacacaatttactcccaaccaaaactgaatgacaaactaggacagcactatgatgtatcaggaagaatatcgctagatctacttagaaaaatacttcctaccgataattttgacgtatatctatgtggttctgaatcttttatgcgctcaagctatacaaatttaaaagcgatgggtatcgctgaatctagaatattttatgagtttttcgacgacggttcatttgaaagccatcagctaaacaaatttcaaacagcacagcgagctgaaatatatttcgcaaaaagtaacattaccgcaacgtggacaccaaacgacggtaccttattacaatttgccgaaaaaatgggtttaaaaccaatgtatagctgtcgcactggtaactgcggcacttgtagctgcacgctaagcaccggcgaagtaacctacgccaataaacccggctatacaccagcaaatggtagcgctttaatatgctgcgcccgccccgcactaaacaccaccaagttaacctttcacatataa

SEQ ID NO: 41 - DNA, 1182 bp, Pseudomonas fluorescens
atgcttagcgtccaggatcgtgccatcgtcaaatccactgtgcctctgctggaaagcggcggtgaagcgctgatcacccatttctaccggatgatgctctccgagtacccggaagtccgcccgctgttcaaccaggcccaccaggccagcggtgaccagcctcgcgccctggccaacggcgtgttgatgtacgcccgtcacatcgatcaactcgaccagttgggcgatctggtggccaagatcatcaacaagcacgtggcgttgcagattctgccggaacactacccgatcgtcggcacctgcctgctgcgcgccatctccgaagtgctcggcgaagaaatcgccacgccggaggtgatgagcgcctggggcgcggcttacggtcagttggccgagattctgatcggtgccgaaaccgccatttatgaccagaaagagcaagccgtcggcggctggcgcggggcacgggagttcatcgtcgcggccaaggtcgaggagagcgcggaaatcatttcgttctactttgaaccggcggacaaaggcccgatcctcgcagccgaacctggccagtacatcggcatgaagctggtgctcgacggtgaggaaatccgccgcaactattcgctgtcggccctggccaacaaaggccaataccgcatcagcgtcaaacgcgaaccgggcggccgtgcctccaattacctgcatgatcaactgcatgtcggcgccagtattcagctgttcccgccatcgggtgagttcaccctgactgccagcgacaaaccgctggtgctgatcagcggcggcgtcggcatcactccgacactggcgatgctggaagcggcgctggaaaccgagcgtccggtgtacttcatccacagtgcgcgcaatggcagcgtgcatgcgttccgcgactggatcgacgggctggccgcgcgtcatccgcagctcaagcgcttctattgctacgccgaagatgatggtgtgagcccggcggcggacaaggtcgggttgttgagcgaggagcaactgggcgagtggctgccggcggagcgtgatgtggacgcttacttccttgggccgaaaggtttcatgggggcgatcaagcgtcatctgaaggcgctgggtgtgcctgagaagcagagccggtatgagttcttcggaccggctgctgctttggaatga

SEQ ID NO: 42 - DNA, 1182 bp, Pseudomonas aeruginosa
atgttgtccaatgcccaacgtgccctcatcaaagccaccgtaccgctgctggagaccggcggtgaagcgctgatcacccatttctaccgcaccatgctcggcgagtaccccgaggttcgcccgctgttcaaccaggcccaccaggccagcggcgaccagccgcgggcgctggccaatggcgtgctgatgtacgccaggcacatcgaccagttgcaggaactcggcccgctggtggccaaggtggtgaacaagcatgtctccctgcaggtgttgcccgaacactatccgatcgtcggcacttgcctgttgcgggcgatccgcgaggtcctcggcgaacagatcgccaccgacgaagtcctcgaagcctggggcgcggcctaccagcaactggccgacctgctgatcgaggccgaggagtcggtgtatgccgccagcgcccaggccgatggcggctggcgcggcgtgcggcgctttcacgtggcacgcaagcaggcggagagcgaggaaatcacctcgttctacctggagccggtggacggccagccgctgctggcgttccagccgggacagtacatcggcctgcggctggacatcgacggcgaggaagtgcgccgcaactattcgctttccgctgccagcaacggccgcgaataccgcatcagcgtcaagcgcgaggcgggtggacgggtctccaatcacctgcatgaccgggtcgccgagggcgacgagctggatctgtttccgccggctggcgatttcgtcctgcgtgacagcgacaagccgctggtgctgatcaccgccggcgtcggcatcaccccggccctggccatgttgcaggaagcgctgccgcaggcgcggccgatccgcttcatccattgcgcccggcatggcggcgtgcatgccttccgcgactggatcgaagatgtgtcggcgcagcacgagcaggtcgagcacttcttctgctacagcgaaccgcgcgtcggcgacagtcccgacgccgagggagtgctgagccgcgagaaactggccgactggttgccgcaggagcgcgacctggacgcctacttcctcggaccccggcctttcatggcgcaggtcaagcgccacctggccgacctcggcgtaccctcgcagcaatgccactacgagttcttcggtccggccgccgcgctggacgcctga

SEQ ID NO: 43 - DNA, 954 bp, Pseudomonas aeruginosa
atgatcgaggtcatcgtcggcgccatccgcctggaggcgcaggatatccacagcttcgaactgttccgggccgacggggcggccctgccgtccttcgagccgggcgcacacatcgacctgcacctgcccaacggcctggtccgccagtactccctctgcggccccgccgaacggccgcgccactaccgtatcgccgtactccgctgccgcgactcgcgcggcggctcggccacgctgcacgccgaactgcgggtcggccagcggctgcgcatcggcgagccgcgcaatctcttcccgctgtcgccggagcccggtccgcgcctgctgttcgccggcggcatcggcatcacgccgctgctggcgatggccgaacgcctggcccgcgatggcgccaacttccagttgcactactgcgcgcattccgccgagcgcgcggccttcgtcgactatcttgaccggtgcgccttcgccgaccgcgtgcactgccacttcgaccacggcgacagcagccgccgcgcggaccttcgcgccctgctggcggccagtccacgcgacgcccagctatacctttgcgggccggcgggcttcatgcagtggatcgaagaaagcgcccgcgaactgggctgggaagcaagccgcttgcatcgcgagcacttcgccgccgcgccacgggacgccaatgcggacggcaccttcgaagtgcagttggcgagcaacggggcgctgatccgggtcgccgccgggcagaccgtgctggcggccctgcgcgaagccggggtggacctgccggcctcctgcgagcagggcatctgcggcacctgtctgacccgcgtgctggacggcgagccggagcatcgcgacctctacctcagcgaagaggagcaggccgccaacgattgcttcacgccctgctgttcgcgttcgcgcagcccacggctggtgctggatctctag

SEQ ID NO: 44 - DNA, 1182 bp, Pseudomonas aeruginosa
atgttgtccaatgcccaacgtgccctcatcaaagccaccgtaccgctgctggagaccggcggtgaagcgctgatcacccatttctaccgcaccatgctcggcgagtaccccgaggttcgcccgctgttcaaccaggcccaccaggccagcggcgaccagccgcgggcgctggccaatggcgtgctgatgtacgccaggcacatcgaccagttgcaggaactcggcccgctggtggccaaggtggtgaacaagcatgtctccctgcaggtgctgcccgaacactatccgatcgtcggcacttgcctgttgcgggcgatccgcgaggtcctcggcgaacagatcgccaccgacgaagtcctcgaagcctggggcgcggcctaccagcaactggccgacctgctgatcgaggccgaggagtcggtgtatgccgccagcgcccaggccgatggcggctggcgcggcgtgcggcgcttccgcgtggcacgcaagcaggcggagagcgaggaaatcacctcgttctacctggagccggtggacggccagccgctgctggcgttccagccgggacagtacatcggcctgcggctggacatcgacggcgaggaagtgcgccgcaactattcgctttccgctgccagcaacggccgcgaataccgcatcagcgtcaagcgcgaggcgggtggacgggtctccaattacctgcatgaccgggtcgccgagggcgacgagctggatctgtttccgccggctggcgatttcgtcctgcgtgacagcgacaagccgctggtgctgatcaccgccggcgtcggcatcaccccggccctggccatgttgcaggaagcgctgccgcaggcgcggccgatccgcttcatccattgcgcccggcatggcggcgtgcatgccttccgcgactggatcgaagacgtgtcggcgcagcacgagcaggtcgagcacttcttctgctacagcgaaccgcgcgccggcgacagtgccgacgccgagggattgctgagccgcgagaaactggccgactggttgccgcaggagcgcgacctggacgcctacttcctcggaccccggcctttcatggcgcaggtcaagcgccacctggccgacctcggcgtaccctcgcagcaatgccactacgagttcttcggtccggccgccgcgctggacgcctga

SEQ ID NO: 45 - DNA, 954 bp, Pseudomonas aeruginosa
atgatcgaggtcatcgtcggcgccatccgcctggaggcgcaggatatccacagcttcgaactgttccgggccgacggggcggccctgccgtccttcgagccgggcgcacacatcgacctgcacctgcccaacggcctggtccgccagtactccctctgcggccccgccgaacggccgcgccactaccgtatcgccgtactccgctgccgcgattcgcgcggcggctcggccacgctgcacgccgaactgcgggtcggccagcggctgcacatcggcgagccgcgcaatctcttcccgctgtcgccggagcccggtccgcacctgctgttcgccggcggcatcggcatcacgccgctgctggcgatggccgaacgcctggcccgcgatggcgccgacttccagttgcactactgcgcgcattccggcgagcgcgcggccttcgtcgactaccttggccggtgcgccttcgccgaccgcgtgcactgccacttcgaccacggcgaaagcagccggcgcgcggaccttcgcgccctgctggcgaccagtccgcgcgacgcccagctatacctttgcgggccggcgggcttcatgcagtggatcgaagaaagcgcccgcgaactgggctgggaagcaagccgcttgcatcgcgagcacttcgccgccgcgccacgggacgccagtgcggacggcaccttcgaagtgcagttggcgagcaacggggcgctgatccgggtcgccgccgggcagaccgtgctggcggccctgcgcgaagccggggtggacctgccggcctcctgcgagcagggcatctgcggcacctgcctgacccgcgtgctggacggcgagccggagcatcgcgacctctacctcagcgaagaggagcaggccgccaacgattgcttcacgccctgctgttcgcgttcgcgcagcccacggctggtgctggatctctag

SEQ ID NO: 46 - DNA, 1191 bp, Salmonella enterica
atgcttgacgcacaaaccatcgctacagtaaaggccaccattcccctgctggttgaaacaggaccgaaactgaccgcccacttctacgaccgtatgtttacgcataacccggagctcaaagaaatcttcaatatgagcaaccagcgtaacggtgatcagcgcgaagccctgtttaatgctatcgcggcctacgccagcaatatcgaaaatttaccggcgttgctgccggcggtagaaaaaatcgcgcagaagcacaccagcttccagattaagccggagcagtacaacatcgtcgggacgcatctgctggcgacgctggatgaaatgttcaacccgggccaggaagtgctggacgcatggggtaaagcctatggcgtactggctaacgtctttattcatcgggaagccgagatttatcacgagaacgccagcaaagacggcggctgggaaggcacgcgccccttccgcatcgttgcgaaaaccccgcgtagcgcactgatcaccagctttgagtttgaaccggtcgacggcggtacggtggcggaataccgtcccgggcagtatctgggcgtctggctgaagccggaaggttttgcgcatcaggagatccgccaatattcactgacccgtaaacccgatggcaaagggtaccgtattgccgtgaagcgtgaagacggcggccaggtatcaaactggttacaccatcacgccaacgtaggcgatgtggtgcatctggctgcgccggcaggtgacttctttatgaatgtcgccgctgatacccccgtttcgctgatttccgctggcgtcggccagacgccgatgttggcgatgctcgatacgctggcgaaagaacagcataccgcgcaggtgaactggttccacgcggcggagaacggcgacgtccatgcgtttgccgacgaagtgagcgagctgggccgtacactgccgcgtttcactgcccatacctggtaccgcgagccaaccgaggccgatcgcgcccaacgcgtctttgacagcgaagggctgatggatttaagcaaactggaagccgcgatcagcgatccggcaatgcagttctatctttgcggcccggtaggctttatgcagtttgccgcaaaacaactggtttcacttggcgtgaataacgaaaacattcattacgaatgcttcggcccgcataaagtgctgtaa

SEQ ID NO: 47 - DNA, 1185 bp, Vibrio vulnificus
atgctcagcgaaaacaccattaacattgtaaaatcgaccgcccccctgttggccgaaacaggaccaaaactgaccgcccatttctaccaacgtatgtttgagcacaatcctgaactcaaagatatctttaacatgagcaaccaacgcaatggtgaccaacgagaagcgttgttcaacgccatctgcgcctacgccagcaacattgacaatctgcctgcactcttaggcgcggtagaaaaaatcgctcacaagcactccagctttctgatcactgccgatcaatatcaaattgtcggcggtcacttgctggcaaccattgatgaacttttctctccggggcaagctgtgctcgatgcctgggctgaagcttatggtgtgctggcgaatgtcttcattcagcgagaagagcaaatttatcaagacaaccaatcgcaaaccggcggctggcgtggcttgcgagagtttgaactggtcgaaaaacaatacgagagtgcgcacatctgtagctttgtctttaagcccgtcgatggtggctctgtcgttagcttcaaaccagggcaatatttagggatttacatcaacgatgagcagtttgaaaatcaagaaattcgccaatacagcttgtcatcctctgtacgtcctgattgctatcgcatttcagtgaaacgtgaagaaggcggccgagtctctaactatctgcacgatcatctcgacgttggcagcaaagtcaaactcgcggcgcctgccggtgactttttccttgatgccgcgccaacggcaccagtcgtgcttatctctgcgggtgtcggcctcacgccaacactttctatgcttgaaagcctaaccgagcatcaagcgccggtgacttggattcatgcaactgaaaatggccaacaacacgcatttaaacaacacgtcaaacaattggttgaaacgcatccgcatttcaattcgttagtttggtacaaccaaccaaactcagacgataaaatcggtgacgatttccagttcagtggatgggtgaacctgcatgagattgaaaccgtcctcaaacaggctgatgtacaagtgtacttctgtggccctgttggctttatgcagtttatagccaaacaattgcttgagatgggagtgcctgaacaacagttccattacgaatgttttggcccacacaaagtggtttag

SEQ ID NO: 48 - DNA, 1191 bp, Erwinia carotovora
atgctggataaccacactatcgccatcgttaaatcgaccatccctctgctggcggaaaccggcccgaaactaaccgcacatttttacgatcgcatgtttacacataaccctgagctcaaagatatctttaacatgagcaaccagcgcaatggcgatcagcgggaagcactgttcaatgccatttgtgcttatgcgacgaatattgaaaacctggctgcgctgctgcctgcggttgagcgcatcgcccagaaacataccagttttaacattcaggcagatcagtatcagatcgtgggtaatcacttattggccacgctggacgaaatgtttagcccagggcaagaagtgctggatgcctggggtaaagcctatggcgtgctggcgaacgttttcatccagcgtgaggacgatatctatcgcagcaccgaaacgaaaaccggcggctggagtggcgtgcggcctttccgtattgtgaacaaacagttgcaaagttccgtgattaccagcttcacactggaacccaccgacggccagcctattgctgattttcagccgggccagtatctggcgatttatatcaagcatgacagttttgccaatcaggaaattcgccaatactcgctgactcatgcgccgaatgggaaatcctaccggattgcggttaaacgtgaagcacaaggcactgtttccggctatctgcatgataccgctcgcgaaggcgatattgttcatctggcggctccgcacggcgacttcttccttgatattccaaccgacacaccggttgccttgatttcaggcggcgtggggcagacccccatgctgggcatgctgcatacgttaaaacaacaggatcatcaggcgaaggtgctatggctgcacgcggcagaaaacggcacagcacacgcgtttactgatgaaattgaacaaacgggacaggcgctgccgcatttcgatcaccacatctggtatcgggaaccgcaacaaaccgatcgtccgggtgaagattatcatcacagcggactgatgcagttggcctcgctaaaaggcgaattgaccacgcccgatatgcactattacctgtgtggccccgtggttttcatgcagtttgtcgcgcagcaactgctggcaatgggcattcccgctgagcagctgcattacgaatgttttggtccacataaagtcgtctaa

SEQ ID NO: 49 - DNA, 1221 bp, Oceanobacillus iheyensis
atgtcaaacacaaccgtacttttagacaaaaaaacgacagaaattattaaagctaccgtaccagtattaaaggagcacggagaagccataactaagcatttttacaagatacttttagaaaacaatccagaactaaaaaatgtctttaatcaaacaaatcaacggaaaggagcccaatcgaaagcactagcaaatacggtatacgctgctgcagcaaacattgagaaattagaagaaatcttaccacatgttaaacaaattgcacataaacatgtcagtttaaatattaaaccagaacaatatcctattgttggtaaatacctgttaatagcgatcaaggaagtattaggagatgcagctactgacgaaattatagaggcatgggaaaaagcatactttgttatcgcggacatctttatatccgtagaaaaagagatgtacaacgagaaaaagaaccagatcggtggatggaccggttttcgtgattttaaagttattaaaaaagtaaaagaaagtaaggagattacttctttttatctcaagccggatgataatttaccaatcaccactttcatacctgggcaatatattacgataaaagcacagatagaaagtgaagcttatgttcatttacgacaatatagcttatcaacggcaccagggaaagattattatcgtattagtgtaaaacgagaagcttcaaatcaaccgattggagttgtatctaattatcttcacacttctgtggaagtgggatctgttttaccaatcagtgcacctgctggtgattttattttagacgaacgtgaccaccgtcctctagttttaattagtggtggagttggattaactcccatcatgagtatgttagaatccgttgtagaacatcagccaaatcggaatgtagtattcattcatgctgccaaatctatcgaccatcaagcgatgagaaaaagagtttctgaaatagcaaaatctaaagaacaagtgaagcagtatgttgtatatagtaacccaacgaatcgtacagatggagataaacaaggctatatcgattatgaatggttaaaagaagttatccctacaaaagatgctgccttttacttgtgcgggccgaagccttttatgagtgcaataaacaatgatctacaaaatatgaacattgctcaaaacgatattcatatggaattatttggacctctcgaacctattgcgaagtaa

SEQ ID NO: 50 - DNA, 1209 bp, Bacillus cereus
atgttaagtgaaaaaacaattgaaatcgtaaagtcaacagtaccattattacaggaaaaaggcgttgaaattacaacgagattttatgaaattttattttcggaacatccggagctattgaatatcttcaatcatacaaatcagaaaaagggaagacaacaacaagcgttagcgaatgctgtttatgcagctgcaacgtacattgataatttagaagttattattccagttgtaaaacaaattggtcataagcatagaagtttaggtattaaagcagagcattacccgattgtaggtacatgtttactacgcgcaattaaagaggtcgcaggtgcacctgatgaagttttaaacgcatggggagaagcttatggtgtcattgctgatgcattcattagtattgaagcagagatgtatgaagaagcggcacataaagaaggtggatggaaagatttccgtaactttgtagttgtaaaaaaagtgaaggaaagcgatgttattacgtcattttatttgaaacctgaagatggagggaaagtttcttcattcatcccaggacaatatgtaacggttcaaatcaatattgaaggtgaaacatatacacataatcgtcaatatagcttatcagatgctcctggaaaagaatattatcgtattagtgtcaagaaagaaaaaggtgtagatacaccggacggtaaagtatctaattacttacatgatcatgtaaaagaaggcgatatgttaccagtcagtgcaccagcgggagatttcgtattaaatatggattcaacattaccagttgtcctaattagtggtggagtaggtattacaccaatgatgagtatgctaaatacgttaattgaacaagattcaaaacgtaatgtatgttttgttcatgcagcactaaatagtaatacacatgcaatgaaagaacacgttgaggcattagataatgaatacgaacaagtgaaagcatacacttgctattcggcgccgactgaaaaagatctggaaatgaaaaactttgataaagaaggtttgattgaggctgaatggctgcaaacgattattccgacaacggaagcagaattttatttctgtggtccagtagcatttatgaagcatataaatgctacattaactgatttaggtgtgaaacaagagcatattcattatgaatttttcggtccagcagcaagcttacaatag

SEQ ID NO: 51 - DNA, 1185 bp, Vibrio parahaemolyticus
atgctcagcaatcaaaccattgagatcgtgaaagcgaccgcgccactaatcgcagaaacaggaccaaaactgaccgctcacttctatgaccgcatgtttactcacaaccctgagttaaaagacattttcaacatgagcaaccagcgtaatggcgatcaacgtgaagcgctattcaatgccatctgtgcatacgctgctaacattgaaaacttgcctgctctgcttggcgcagtggagaaaattgcgcataaacacaccagctttttgatcacgaaagatcagtatcaaatcgtaggtaaacacttgatcgctacaattgatgagttattcaatccgggccaagaagttttagacgcgtgggctgaagcttatggcgtattggctaatgtatttatccagcgcgaagagcaaatctatcaagcgaatgcatcgcaagaaggtggctggcgagggctacgtgagtttgagttggtcggtaaacaattggaaagtgaacacatttgcagttttgttttcaaaccgacggatggcagtaaagtgacgaagtacaagcctgggcagtacctcggcatctacatcaacagcgataagtttgaaaaccaagagatccgtcaatacagcctatcttcttcggttcaagagaacacttaccgcatctccgtaaaacgtgaacaaggcggtaaagtatccaactacctgcacgatgagctaaacatcggcgataaagtaaaactcgcagcgccagcgggtgatttctttatggatgtagacaccaatacaccagtggtgctgatttctgcaggtgtcggccttacgccaacactgtcaatgctagaaagcttgacggagcatcacgcgccagtgacttgggtacatgcaacagaaaacagcaaacaccacgcctttaaagagcacgtaaaccagctagtcacggcgaaagaaaacatgaacgcgctcatttggtataaccaaccaacggcagaagacaagataggtgaagacttccactttaccggctttgtaaacctgcatgaaatcgaagccgcactcaaacaagacaacgtacaagtgtacttctgtggtccggtgggctttatgcagcacgtcgcgaaacagctacaagaacttggcgtccctcaggaacaattccattacgaatgctttggcccacataaggtggtttaa

SEQ ID NO: 52 - DNA, 1200 bp, Bacillus subtilis
atgttagataacaaaacaatcgaaattattaaaagcactgtacccgtattgcaacagcatggagaaacaatcactggccgtttttacgatcggatgtttcaagaccatccagagcttttgaacatttttaatcaaacaaaccaaaagaaaaaaacacagcgaactgcactggcaaatgccgttattgcagctgcggcaaacattgaccaattaggaaacatcattccggttgtcaaacaaatcggccacaagcaccgcagtatcggaattaagcctgagcactacccaatcgtcggtaaatatttgctgattgcgattaaagatgtattgggagacgctgcaactcctgacattatgcaggcatgggaaaaagcgtacggagtcattgctgacgcgttcatcggaattgaaaaagacatgtatgaacaggctgaagagcaagccggcggctggaaggagtataagccattcgttatcgcaaaaaaagagcgggaaagcaaagaaattacatccttctatttgaaaccggaagacagcaagccgttacctgaattccaagcagggcaatatatcagcatcaaagtgcggattcctgattctgaatatacgcatatccgccagtacagcctgtctgatatgccgggaaaagactattatcgaatttcagtgaagaaagatggtgtcgtgtcttcctacttacacgatgggctgcaggagggagattcaatagagatcagcgcaccggcaggggactttgttttagatcatgcatcacaaaaagatctcgttttgatcagtgccggagttggcattacaccaatgatcagcatgctgaaaacatctgtttccaaacagcctgaacggcaaattctgttcattcatgcggcgaaaaacagtgaatatcatgcattgcgccatgaagtagaagaagcagcaaaacattctgctgttaaaacagcatttgtgtatcgcgagccgacagaggaagaccgtgcaggtgatctgcattttcatgaaggacagattgatcagcaattcctcaaagaactgattgccaacacagatgcggattactatatttgcggttcaccgtcgtttattacggcaatgcataagcttgtatcagagctcggatcagcgccggagtctatccattacgagctattcggcccgcaattaagtttggcgcagtccgtttga

SEQ ID NO: 53 - DNA, 420 bp, Aquifex aeolicus
atgttgtccgaggagactatcagggtcattaagtcaactgtccctcttctgaaagagcatggtacggagataactgctaggatgtacgaattgctgttttcaaagtatcctaaaactaaggagttatttgcaggggcttcggaggaacaaccaaagaagcttgcaaacgccataatagcctacgctacctacattgataggctagaggagcttgataacgctatctcaacgatagccaggagtcatgtgcgaagaaatgtaaagccggaacattatccgctggttaaagaatgtctcttacaggcaattgaagaggttttaaatcctggggaggaagttctcaaagcatgggaagaggcgtacgattttcttgctaaaacgcttataaccctagagaaaaaactttatagccagccttag

SEQ ID NO: 54 - DNA, 1764 bp, Bradyrhizobium japonicum
gtgatggcacgtctgctttccgtcaatgtcggcctgccgcgcgacgtcgcctggcaaggcaagaccgtccataccggcatctggaaggcccccgtcgaagggccgcgcagggtgcgcaggctcaacatcgacggcgacggccagggcgatacggccggccatggcggcgaacagcgcgccgtcttcgtctaccaggacgagtcctatcggtactggcaggaacatctgggacgaccggatctcgttcatggtcaattcggcgagaacttcaccgtcgaaggccttgccgacaccaacgtgtgcattggagaccgctacaggatcggctccgccctgttcgaggtgacgcagccgcgcgtcacctgctaccggctgggcattcgcatggacgagccggacatgcccgcactgctcgttaggcacggccggcccggcttctattttcgcgtgatcgaggaaggcgacgtggaggccggtgacgagatcacgcttctcgccaacggtcccgaaagcatgagcgtgttcgagatcaacgcgctgctttacctgccccctcacccgcgcgaccgcctagagcgcgcgctgcggattccggcgctgagccgcggctggaatcgttccttcgcatcgctgctcgagcagcagcgcacaagcaagattgccgcaggaaacgccgggctcggcccggcggcgagcccacctcctgcctggcgcggttttcgtccgtttcgcgtctcgcgcaagatcgccgaaagcggcaccgtgacgtcactgatcctcgaacccacggacgggcatcgcgcggcccccgccctgcccggtcaatttgtcgtcgtgcggctcgggccctctgaggcacaggcgatgacgcgcagctactcgctgtcgagccgctccgatgccccgccctaccgcatcagcatcaagcgggaagcgcacggcgcggcctccctctatatcgccgacagtctccgagttggcgacgtcgtcgaagtcggtgcgccacgcggcagcttcacgctccggcaggatgcgcggcccgtcgtcttgctcagcgcgggcatcggcgtgacgccggtgctcgccatgctccacgcgctcgtcgcggaagggtcgacgcgagacgtctggtggctgcacggcgcgcgcaacggccgcgagcatgcgttcgccgccgagacgcgcgggctgttggccggactcgctcactatcacagccacgtctgcttcagcgcacccgatccggccgatcgtccgggagcggatttcgacagcgccggacatctggatcagcacctgatcgaacggctcaacatgccgcgcgacggcgatttctatctctgcgggccggccgctttcatgagcgatctcacggccggcctggccgcattgggcgtcgcgcccgatcgcatccacaccgagctgttcggcgcgaggccatcgctgacgcccggcatcgcggcttcgccgcggacacccgcgcatgcgccggtcggagcacccggcccgggcccgatggtgtcattcgcgcgcagcggcctcaatgtccgctggggaccatcctatgccagcctgctcgagctggccgaagcgtgcgacgtcccggtgcgctggtcgtgccggaccggggtttgccacaactgcgagagcgggctcgtggccggagaagtcagctacgcgcccgatccgctcgacccgcccgcggacggcaatgtcctgatctgctgctcgcaaccgaaggcagatgtcgtgatcgatctttga

SEQ ID NO: 55 - DNA, 1209 bp, Bacillus cereus
atgttaagtgcaaaaacaattgaaatcgtaaagtcaacagtaccattattacaagaaaaaggtgttgaaattacaacgagattctatcaaattttattttcggaacatccggaattgttgaatattttcaaccatacgaatcagaaaaagggaagacaacaacaagcgttagcgaatgctgtttatgcagctgcaacgtacattgataatttagaagcaattattccagttgtaaaacaaattggtcataagcatagaagtttagggattaaagctgagcattatccgattgtaggtacatgtttactacgtgccattaaagaggtcgcaggtgcacctgatgaagttttaaatgcatggggagaagcatatggtgtaattgctgatgcattcattagcattgaagcagagatgtatgaagaagctgcacataaagaaggtggatggaaagacttccgcaactttgtgattgtaaaaaaagtgaaggaaagcgatgttattacgtcattttatttgaaacctgaagatggagggaaagtttcttcattcatcccaggtcaatatgtaacaattcaaatcaatattgaaggtgagacatatacacataatcgtcaatacagtttatccgatgctcctgggaaagaatattatcgtattagtgtaaaaaaagaaaaaggtgtagatacaccagacggtaaagtgtctaattacttacatggacatgtaaaagaaggagatgttttaccagtaagtgcaccagcgggagatttcgtgttaaatatggattcaacattaccagttgtactaattagtggtggagtggggattacaccgatgatgagtatgttaaatacgttaattgaacaagattcaaaacgtaatgtatattttgttcatgcagcaataaatagtaatacacatgcaatgaaagaacacgttaaggcagtagaaaatgaatatgaacaagttaaagcatatacttgttattctgcaccgactgaaaaagatttagaaatgaagaactttgataaagaaggtttcattgaaagtgaatggttaaaaactattattccgacaactgaagcagagttctatttctgtggtccagtagcatttatgaagcatataaatgctgcactaactgatttaagtgtgaaacaagagcatattcattatgaatttttcggcccagcaacaagcttacaataa

SEQ ID NO: 56 - DNA, 1233 bp, Aspergillus nidulans
atgtccctttctcccgaacaaatccagctcatcaaggccactgtgcctgtgctgcaggagcatggcaccaccatcaccaaggtcttctacgacaacatgctcactgcgcaccccgagctcaaaaccgtgttcaatgtctccaacaaggtccacgggcaccagccgcaggcgctcgcgggcgcgctcttcgcgtacgcgagctatatcgacaacctgggggtcctctcgccggccgttgagcgcatctgccacaagcacgcctcgcttgctatccagcccgacgggtaccagatcgtcggcaagttcctcctcgaagcgatgggccaggtgctcggtgacgcgctcacgcctccgctgctcgaagcctgggcggccgcgtactggcagctcgccaacatcatgattggcaaggaggccgagttgtacaagtccgccgacgggtggactgatttccgtgacttccgtgtcgctcgtaaagagcccgagtcggacgtcatcacctcgttctacctcgagcccgtggacggcaagcctctgccgtctttcctgccgggccagtacgtctctatccaggtgcaggtgccgcaactcaaccacgcgcaatgccgccagtactcgctcagcgaccagccaaagccaacctactaccgtatcagtgtacgcaaggaccttggtctggatgcctctgacccgtccgcgcccgcgcatcccggctacgtctctaacatcctccatgacaatatcaatgttggcgacatcgtcaagctcacccatccctatggcgacttccacctcaccgatgccgccgcctcaagcccgcttgtcctgatctccgctggcgtcggtctcaccccgatgacatcaatggtgaacacgctgcgcaccgccgagtccaacacccgccctgtacatttcatccacggcgcacacacgtccgcatcgcgtgccttccaagcacacctgcagtccctccccaacctcaaaacaacgtacttcctgacggctccaaccgagtcggacaagcaaggcgagaactacacatacaagggtcgcgttgatctatccaagatcgccgacgaggatctcttccttggcgacaagcagactgagtactacatctgtgggccgacggcgttcatgctcgatacacagaaggcgcttgtggccaggggcgtggaccagagccgcgtgcacatggagcttttcggcacgggtggcgtgccggcggcttag

SEQ ID NO: 57 - DNA, 1281 bp, Aspergillus nidulans
atgctgaagaatgtgttgcgacgcggtgcactgcgtctggtgcgtcaacgcgcatcgtatgcgaccagtgctctcaccccccagcaaaagcagattgtcaaggcaacaatcccagcgctcgaacagcacggcgtcacgataacgactctcttctacaaagagatgctggagaggcaccctgagctgaataatatcttcaactcctcgcaccaagcgaccggcgtgcagcctgccgctcttgctcatgctgtctgggcctatgctagtaacattgatcaccccgaggctcttgctactgcagtctcgcgcattggccataaacatgccagtctgggtgtccgctcggagcactatccgatcgtcggcgagcatctgctgcgggctatcaagaaggtgctgggcgatgccgtgacaccgccggtcgcggacgcctggactgcagcataccagcagctcgcagacattttcatttcttttgaagacgacctctacaagcaggcgacccagacccccggagggtggacggggtggcgcaagttcgtcatcgccgacaaggtgcacgagagcgaggagatcatctccttccagcttgttccccaagataatggtcgcctcccgacgtataaaccaggccagtttgtgagcgtgcgctgctttgttccagaactcggcgtctaccagccgcgacagtacagtctgtctgatattccaaatcaacggtacttccagatctccgttaaaaaggagtttgcgtccggtgctcgtcctgccggtcgtatttccaatgttctacatgaatcgctccccaagggctctgaagtcgagatcagcatgccctttggtgattttgtgctcgataccaatgccaccactccagttgttctgatgagtggtggtgtcggcttaacaccgatgatgtccatgctaaagaccgttaccaacaattccaaatcgcgaccggccgtattcgtgcacgcggtgcgcaacggacgcgtccacgcgatgaaggagacgctagccaatatcatgactgacaatccacaggtgaagagggccatcttctatgagcaggtggaggaaggcgacaagcaaggtgtggactatgactatgttggacgtgtcgatgtatctaagatcaaagacctggtgttcttgccggacgcagactactacatctgcggcccatcgccgttcatgaaggcgcagagtgaggcgctggagacattgggagttcgccctgatcgcatccatatggaagtctttgggtcgccgactccataa

SEQ ID NO: 58 - DNA, 1203 bp, Streptomyces avermitilis
atgctgtccgagcagtccgccgccaccgtgcgcgccaccctccccgccgtcggcgcggccgtcggcgagatcaccgcgcgcttctacgaccggctgttcgccgcccgccccgagctgctgcgcgacctcttcaaccgcggcaaccaggcggcggggacgcagcggcaggcgctggcgggctcgatcgccgcgttcgccacgtacctcgtggaacacccggacgagcgccccgacgcgatgctggaccgcatcgcccacaagcacgcctccctgggcatcgcacccgggcagtacgcggtcgtccacgagcacctcttcgcggccatcgccgaggtcctcggcgacgcggtcacccccgaggtcgcggccgcctgggacgaggtctactggctgatggcgaacgcgctcatcgccatcgagcggcggctgtacgcgcagcacgagaacaccggtgacaccggcggccggcggccctggcgggtcgtggagcgcgtggacgagaccgccgacgtcgccgccttccggctgcgcccggccgacggccggcccctcccggacttccgccccggccagtacgtgtccgtccgcgtcgaactcccggacggcgcccgccagacccgccagtacagcctcgtcggcgcgcccggctcaccggagctgcggatcgccgtgaagcgcgtccacggcggtacgacaccggacggcgaggtctcgaaccatctccacgcgcgcgtgcgcgagggcagcgtcctggagctctccgccccgtacggcgatctcgccctggaggccacggacgtgcccctgctgctcgcctccgccggcatcggcgtgaccccgatgatcgcgatgctggagcacctcgccctgaccggccaccgcgccccggtcaccgtcgtgcacgccgaccgctcgccggccgagcacgccctgcgcgcggaccacgaggcgtacgcggccaagctcgcggacgcggccgtccacttctggtacgagcacccggagccggggcacccggccgaccgcacggggctcgtcgacctgaccggcgtgccggtctccgccggcacgcgcgcgtacctgtgcggtccgctgcccttcatgcgcgccgtccgtacccagctcatcgagaagggcgtggcacccgccgacatccactacgaggtgttcggacccgacctctggctcgcccgggagagctga

SEQ ID NO: 59 - DNA, 1698 bp, Streptomyces avermitilis
atgttcgaggcgaggcacaccatggacgctccgaccactacgtcggccgacaacggcacgtccggcggtaccggcggggccggctggttcacgccccgcaagcagccggagacgcctcagggcggcggccaggaagcgcccgagggcagccgtctcgcggcgatgcgcccggtcggccggccatccgcgggtgagggcacggagcagcagcgaataccgccgacggaggaagcggtcgtcgcgcccacccagcccatgtccggcgagccgctccggtcgctccccgaccctgcggcacccgcacccgcccgacatctcggggccacgctcaccgaagagacacggcccgccccggctcccatcgcggcgtcgcagcccgagtcggcccacgaggccctacggccgctggccggacagccgcagtttggacagccgcagtccggccccgttcagccgcagccggcggccgcgctgcccgagcgtggcatcccgcagcgcgaacccgggccgccggagcccggctccccgcgtcctggccccgacccgcaggtgcccacaccggggcccgctccggggccggaggcgtcccccgacgccgtcctcatccgccgcaccatggccgaggtggggcccgtcgccggcaaggtgacctcctacttctacgcgctgctcttcgtgcgccaccccgatctgcgctcgctgttccccgccgcgatggacacccagcgggaccggctgctcaaggcgctgctgaccgcggccgagcacatcgacaacaccgaagtcctggtcgcttacctgcagaacctgggtcgcggccaccgcaagtacggcacccggccggagcactacccggccgtcggcgagtgcctcatcggtgcgctgagccggtatgcgtccgggatctgggacgaggagaccgaggcggcctgggtccgtgcgtacacgacgatctcccaggtgatgatcgacgcggcggccgcggacgagctgcgtgcccctgcctggtggtacgcggaggtcgtctcgcacgatctccggaccccggacatcgcggtgatcacggtccgccccgaccagccgtatcctttcctcgccgggcagtacaccagcctggagacgccgtggtggccgcggatctggcggcactactccttcgcctcggcgccccgctccgacggcctgctgtccttccacgtgaaggcggtcccggcgggctgggtgtccaacgcgctggtgcaccgcgcccggcccggcgacatcatccggctcgggccgccggccggctcgatgactgtcgaccacaccaccgagagcggattgctctgtctgggcggcggaaccggtatcgctcccatcaaggcgctggtcgaggacgtcgccgagcacggtgagcgccgcccggtcgaggtcttctacggcgcccgtagggaccatgacctgtacgacatcgacacgatgctgcggttgcagcagagccacccctggctctcggttcgccctgtcgtggaccagcgggcgcatctccagcttcccgacgtcatacgcgagtacgggccctggaacgagtacgacgcctacctctcgggcccgccaggcatgatccgtagtggtgtggacgccctgaggggcatcggcattccgccggaccgcatccgccatgactcggtggaggaactggtggcggccggggactga

SEQ ID NO: 60 - DNA, 756 bp, Streptomyces avermitilis
gtgactgagaccttcgtacccccgacccggttcgccgtgcccggccggatcgccgtgagcaaccgggcagcggccgtctggcagaccgccacgctcaccgagatccgccgtgagacgccgcacgccgccaccttccggttcgcggtgcccggctggcagggccatctgcccggccagcacctgatgctgcggctgacggccgaggacggctacggggcgcagcggcactactcgatcgcgtcgccgcccgaggacgccgggcacatcgagctgacgctggaccatgtcgagggcggcgaggtctccggctggttccacacggtggccgagcccggtgacgaggtgcaggtgcgcggtccgctcagcggcttcttcgcgtggcccggcgaccggcccgcgctgctgatcggcgcgggctccggtgtcgtaccgctgatgtcgatggtgcgccatcaccgggcgcaggggtcgacggtgccgttgcggctgctcgtctcggcgcgcagcccgcaggagctgatctacgcccgcgagtacggcgacgagaccacgcccgtcttcacccgcgacgccgcggcgggggtgcccgtgggccgtatgtcggccgcccatgtggcgccgctcctggaccgggcgcctcctggtgggtgggaggcctatgtgtgcggctccaacgggttcgcggagcatgcctcgcggctgctcgtcgaggccggtcagccggtgcaccgtatccggatcgagcgcttcggctga

SEQ ID NO: 61 - DNA, 1020 bp, Actinobacillus pleuropneumoniae
atggcaaataccaataaaaaccctttatgtattaacgaattacaggtttattcaatcgtacaagaagcacctcatgtaaaaacgattaactttatcgcacaggatttctacccatatcaagcggggcaatatgcgttagttagcattaaaaacacgccgcatattactcgtgcttactcactgtcttctaccccgggcgaaagccgtttcgtatcgattaccgtgcgtgaaattgaaggcggcgtcggttcgacttggctcaataatgaggtaaaagtcggtgaccaagtatggttctcgaatccaatgggcgagttctcttgccaacacgtattggcggataattacttattagtcggtgcgggaagcggcgttaccccgattatgtcaatggctcgttggttattagcaaaccgccctaaagtgaacttaaccgttatccattcggtgcattcgccggaagatgtgattttcaaatcggaatggcaagaattaaaagccaaatatccgcaactcaacttagtaatgaacgcttcggtcggggcaaccgaaggctttgcaagcggtcgaatttcagcggaaattatcaaaaatgccgtgccgaatgtgagcgattacaccgtgatgacctgcggccctgaagcctatatggcggcattaaaaaatatcgtgcttgaattaggtgttagcgaagatcgtttctttaccgaagccttctttaatacctccttagccggagaaatcagttcggataagaaaaccaccctaactattaacgctgcaaaacaaattaaagcggaagtgccggtcggtatgaccttattagccgctttagaagcgcaagaacaaccggtggtttccggctgccgcaccggtttatgcggtttatgcaaaaccaaagtaacgggtggggaatatgaagtagtcggtaccggcgatttaaccgaagaggaaatcgcacaaggctatgtactggcgtgtagctgccgtgtaaaagaaaacgtatcggtttctttataa

SEQ ID NO: 62 - DNA, 1374 bp, Gibberella zeae
atggctttgtcctatcagcaaaccaagctcatcagaggcaccatccctgccctgactgaccatggagagcgcatcaccaccatcttctaccgcaacatgcttcgtgatcaccccgagctcaacgactacttcaacacagtcaaccaagcaaacggccgccaaccccgtgcccttaccgctgttatcctcagctacgccaacaacatcaaccacatcacagagctcatcccaaagatggagcgcatgtgccacaagcattgctccctcggtatcaagccagaacattatgctatagtcgagaagtatctcattgccgcctttgcagaggttctcggccccaccatgaccacacagatcagagaggcctggacaaaggcctactggatgcttgcaaagatgctcatcggccgtgaggctcagctctaccgggactttggtaagtggcagggctaccgaaagttccgcattgagaagaaggttgaagaatcggacgacatttattccttctacctcgttcctgtcgatggcaagcgcctcccttccttccagcctggccaatacgtctctgttcagatccccatcgtcgacaagggatatgttcagtctcgccaatattctctgagcgatgctccccgacctgactattaccgagttactgtcaagagagacgagggcatccacatgacccgtagcggccgatatcttggcggcgatgccctcaaccccggtgtcgtctcaaacctcctcatcgatatgaaggacgagggcgacgtcgttgagctggctcaccctgccggcgaattctacctcgacatgtccaacacatccaacgttcccatcgttctcatttcggccggcgtaggcgtcacccctatgatgtccatcctcaacaccgtttccgaacgccagcctcaccgtcccgtctcctggatccacggctctcgacgctctgtccccttctacgaccaggtccgccgcattgctcgcaaccgttccaacttccgcacaaacattttcaagactcaccttgccgaatccgacatctttggtgtcacgtatgaccatgacttccgcatggacttggctaaggtctctaaagatgacctttacctgtgccacagctccaccgagtactatatttgcggtcctgagcaattcatgcttgagatggccgagtacctcaaggcccaaaaggttgatgccagccgcatgcactttgaactcttcagcactggtgacatggagttcaaggttgataacctgagcatttcttctgcttccaagagcccatcgatcgccagcgctgagcaaagatgtcccagcactggagcggtgtctgccgatggtgctacctgcccattctcagcggtataa

SEQ ID NO: 63 - DNA, 1248 bp, Gibberella zeae
atggctctcacagcagcacaagtagcaatcgtcaagagcacagctcccatcctcaaggagcatggcaagaccatcaccaccactttctaccgcaacatgctcggcgcccatcctgagctcaagaattacttctctctccgcaaccaacaaacaggcgcccaacaagctgctctcgcaaactccgtcctcgcctacgccacatacattgacgatctcggcaagctgtcccacgccgttgagcgcatcgcccagaagcacgtctccctgtttatcaaggccgagcactaccccatcgtcggcacgcatctcatcggcgccattggcgaagtcctcggttcagctctgaccactgaaatcaaggacgcttgggtcgctgcgtacggccagctcgcagatatctttatccagcgcgagggtcagctgtacgatgccgcaggtgaatggaactcgtggcgcaagttcaagattgccaagaaggaggctgagaacgactccgttaccagcttctacctcgaacctcttgacgacaagcctcttcccaagttcctccccggacaatacgtcagcctgcagattcccatccccgagcttgacggtcttctccaaagccgtcagttcagtctgagcgaggccccaggatccaaccactaccgcatcagcgtcaagctccagggtccagaggaagagccttcccttgaagatctctctgctggcaagatccccggtctcgtttgcactaggctgcacaagcgatacaacgtcggtgacgaggtcgagctaagccctcccgctggagaattcttcctcaaccccgccgacacctcggccgccaagaagcctcttgttctcctctcggcaggtgttggtgccactcctctcgtttcgatcctcgattccgttctcgaatcagagactgcctcgcgacccatcacatggatccacggtgctcgttattccggctcaacatgcttcgtgcctcatgtcttggactcggccaagaagcacgacaacatcaccgccaagatcttcctcgaggatgtcaaagaaggcgaccagtacgacttcaagggcgagatcgaccttgaccagctgcaaaaggataagctccttcagcttgacagctctgatgctgagtatttcatctgcggtcccgaggactggatggtcaaggtcagggcgttcctcgaggagaatggagtaccccgtgagcgccagcacctcgagctcttcaagaccggcgacgtctaa

SEQ ID NO: 64 - DNA, 1197 bp, Candida albicans
atgacagtcgaatacgaaaccaaacaattaactccagcccaaatcaaaatcattttggataccgttccaattttagaagaagccggtgaaacattgactcaaaaattctatcaacgtatgattggaaattatgatgaagttaaaccatttttcaacaccactgatcaaaaattattgagacaaccaaaaattttagcatttgctttattgaattatgctaaaaacattgaagatttgactccattgaccgattttgttaaacaaattgttgttaaacacattggtttacaagtgttaccagaacattatccaattgttggtacttgtcttattcaaaccatggttgaattattacctccagaaattgctaacaaagactttttggaagcttggactattgcttacgggaacttggctaaattattgatcgatttagaagccgcagaatatgccaaacaaccatggcgttggtttaaagatttcaaagtgacaagaattgttcaagaatgtaaagatgtcaaatccgtttatttcactccagttgataaagatcttttaccattaccaaaacctgaacgtggtcaatacttgtgtttcagatggaaattacctggtgaagaatttgagatttctcgtgaatattcagtgtcagaattccctaaagaaaatgaatatagaatttctgttagacatgtcccaggtggtaagatctcaggttatattcataacaatttgaaagttggcgatattttgaaagttgctcctcctgctggtaattttgtctatgacccagctacagacaaggaattgattttcgttgctggtggtattggtattaccccattgttatcaatgattgaacgtgctttagaagaaggaaaaaatgtcaaacttttgtactcaaacagatctgctgaaactagagctttcggcaaccttttcaaagaatacaagagcaaatttggtgacaaattccaagccattgaatacttttctgaagacaataacaccgatgacaagattgttattgataaagcatttaaccgtaaattgactactgatgatttagattttattgctccagaacatgatgtgtaccttgttggtccaagagagtttatgaaagatatcaaagaacatttgggtaaaaagaatgttcctgtcaagcttgaatattttggtccttacgatccttaa

SEQ ID NO: 65 - DNA, 1197 bp, Candida albicans
atgacagtcgaatacgaaaccaaacaattaactccagcccaagtcaaaatcattttggataccgttccaattttagaagaagccggtgaaacattgactcaaaaattctatcaacgtatgattggaaattatgatgaagttaaaccatttttcaacaccactgatcaaaaattattgagacaaccaaaaattttagcatttgctttattgaattatgctaaaaacattgaagatttgactccattgaccgattttgttaaacaaattgttgttaaacatattggtttacaagtgttaccagaacattatccaattgttggtacttgtcttattcaaaccatggttgaattattacctccagaaatcgctaacaaagactttttggaagcttggactattgcttacgggaacttggctaaattattgatcgatttagaagccgcagaatatgccaaacaaccatggcgttggtttaaagatttcaaagtgacaagaattgttcaagaatgtaaagatgtcaaatccgtttatttcactccagttgataaagatcttttaccattaccaaaacctgaacgtggtcaatacttgtgtttcagatggaaattacctggtgaagaatttgagatttctcgtgaatattcagtgtcagaattccctaaagaaaatgaatatagaatttctgttagacatgtcccaggtggtaagatctcaggttatattcataacaatttgaaagttggcgatattttgaaagttgctcctcctgctggtaattttgtctatgacccagctacagacaaggaattgattttcgttgctggtggtattggtattaccccattgttatcaatgattgaacgtgctttagaggaaggaaaaaatgtcaaacttttgtactcaaacagatctgctgaaactagagctttcggtaaccttttcaaagaatacaagagcaaatttggtgacaaattccaagccattgaatacttttctgaagacaataacactgatgacaagattgttattgataaagcattcaaccgtaaattgactactgatgatttagattttattgctccagaacatgatgtgtaccttgttggtccaagagagtttatgaaagatatcaaagaacatttgggtaaaaagaatgttcctgtcaagcttgaatattttggtccttacgatccttaa

SEQ ID NO: 66 - DNA, 1203 bp, Candida albicans
atgactgttgctagtgctagtattatcaataattattttgaaagtaaacctttaacaccagaacatattcaaatcattattgattcggtccctatattagaacatcttgacgttcaattaactgagaaattttataaacgattattaaaacaaaatcctgaatttaaaccatttttcaatgaaactcatcaaaaattattacgtcagccacgaatcatgattcattttttaatacaatatgctaaaaatattcaagatttaactcccatgattgattttattaaaaaaattgcttctaaacatgttggattacaagttaaaccggaacattatcctaaattgggacaagtattaattaatgtcattattaatttatttccaaaacaattagttcatgatgaattcattgaagcttggacattagcatatcaaaatttagctaatttattaattaaattagaatcagaacaatacgttgaaaaaccatggtatggattcaaacaattcaaagtgacaagattacaacgtgaatgttcagatgttaaatcattatatattactccagtagatggttcacctattcctaaacctaaacgaggtcaatatttatgtatgagatggttgttaccaggagaaaaacatgaaataactcgagaatattcaatttcagaatatcctaaaaataatgaatatcgtatcacagtaagatatattcctggtgggaaagtttctaattatattcataataacataaatgttggtgatattgtttattctggtccaccatgtggtgattgtgtatatgaatcatcactgaaaaatttagtgtttttagctggtggtaatggagtcacagcattattacccatgattgaagctggtttaaccgaaggaagacaagtgaaattactatattccaatcgatcaactgattctcgatcatttgggaaattatttcaaagttataaattacaatatggtgatcgatttcaagtggtggaatttttatctcgtggaagaaccattgatcctattgataaattttatcgacgttcattaactttagaagatttggattttattgttcctgaagatgatgtttatttgattggtccaagaacttatatgaaaatgattgaagattatttaaaagatagaaatattactgttaaattagattattttggacctcgtgaaatataa

SEQ ID NO: 67 - DNA, 1203 bp, Candida albicans
atgccaattgatatcaacactaaggcaaagtgttattttgatactagacccttaactaaaggggaaagaaaaatcatcaaagattctattcccatacttgaatatcttgatattcagtttggagagaagtttttcaaaaggctaattaaacagtttccacaatacaaaccctatttcaatgaaacgcacctcaagttattgcgtcaaccacgtagtttccatcattgcttgttggaatttgcaagaaatattgatgatttgagaccaatgaaggatttcattatgagaattgcgtcaaaacatgttgcaagacaagtcagtcccgatcagtatcgagtttttgggcaggttttggtagaagttatgatggatcagttcccgaaagaatttgtcgatcaggaatttgtggaagcatggactatggcatttaggattttggccaatatattgataaacatagaagttagagagtaccaagataaaccatggtatggatttaaagcatttagagttacacgattgcaaccagaatgtgtaggtactaaatcttttttcattaccccagttgatggaacgccagttccaatccctaaacgtggtcagtacttgtgtatgcggtggaagttcccaggtgaaaaacaggagaggttaagagagtacacgatatcggaattccccaaaaacaacgagtatagaattacagttaggtatatcccaggtggaaaggtaactacgtatatacatgaaaagctagcagtgggtgatattgtacaggtatcgcccccgtgtggtgattgttattaccgctcgtcaaagagaaatatggttatgttagcaggtggaaatggggtggtcgctctagctccaatgattgagaaagggttggctgaaggaaggaaggtcaagttcttatattcgaacaggtctactgaaacgagatcatttggacagttttttagagatctcaagcaaaagtatggcgatcagcttgaggttgtcgagtatttatcacgacgcagggttattgatccgattgataagtattatagacggtcgttgacggtagaggatttggattttattgtccccgaagatgatgtgtacttgattgggcccaggacatatatgaaaatgattgaagattacttgaagggcagaggtgtgaatgttacattagactattttggtccccaagaagtgtag

SEQ ID NO: 68 - DNA, 1344 bp, Magnaporthe grisea
atgtcggcagtcagggacaagcaacaaccagacgccgccccagcagccgcagcagccgggaacaagccagccccctcgataacgcccgagcaggttgccgtcgtcaagtccacggcaccggtgctcaaggagcacggcgtgaccatcactaccgtgttttacaaaaacatgatcgacgcgcacccggagctgcacaacgtcttcagcaccaccagccaggcgacgggggcgcagccgcgggccctggccagcgccgtgctcgcctacgccacccacatcgacgacctggcaaggctctcgcacgccgtcagccgcatcgcccacaagcacgtgtcgctgcacatcacgccggaccagtacgacattgtcggcaagtacctgatcgaggccatcgggcaggtgctgggggacgccgccacgcccgaaatcgtcgccgcgtggatcgccgcgtacggcgtcctcgccgacgtcttcatcggcgtcgagggcaaaatgtaccaggagcacagcgactggctgggtttccgcaagttcagggtcctgcgcaaggaggccgaggccgagtccatcacctccttctacctggcgccctcggacggcaagacgccgctcccgcggttcctgccgggccagtacgtgagcgtgcagctcttcgtcccggagctggggtacctgcagagccggcagtacagcctgagcgaggggtaccgcaagggcggcgagcactacaggatcagcgtcaagcgcgaggagggcgtcgaggtcggcgcgcccggcatcatcagcaacatgctgcacgacaagatcagcgtcggcgacgaggtcgaggtctcgcacccgcagggcgagttctttgtcgacccggccgacgcgaccaaggctggcgcgccgctcgtcctgctgtcggccggcgtcggcgccaccccgctgctctccatcctcgagagcgtgaccgtggccgacggcggcgtcccggccccggcggccaccaggcccgtgtcgtggatccacgcatcgcgctcccgcgcccagcggccgtttgagacgcgcgtggccgagatccaaaagacggtgggcgaggagcggctgcggagcaggctgttcctgggcaagatcgacgcggaaaaggacgtcgccaaccagcactttcactttggcggcggcaggatggacctcgacaagctggacgcggacagggacctgcacacctcggacgccagggccgagtactacctctgcgggcccgaggcctggatgctggacacgagggagaagctggagcagatgggcgtggcgcacgagaggatccaccttgagctgttcgccacgggtgacgtccagtaa

SEQ ID NO: 69 - DNA, 1254 bp, Pirellula sp.
ttgcgttcctctacgaaggccccgcccatgctgagcgaaaaaacgattcgaatcgtcaaggaaatcacacctttggtcgctgcgaacgcggaaacgatcactcgcagattttacgaacggatgttcgaagccaatcccgaggtgaaggcgtttttcaatcaagctcaccagcattccggcggtcaacagaaagctctcgccggtgcgatctgtgcctacttcacccacatcgacaatcccgccgtgttgatgccggctgttgaattgatcgcacaaaagcatgtttcattgggcatcaagccagaacactacccgatcgtcggcagcaacttgctggccgcgattggtgacgtcatgggggatgccgcgacaccggaaatcgtcgaagccgtttcggaagcctacgggtttttggcggatatcttcatcggccgcgaaggtgcgatctatgaggaacaagcttccatgccgggcggatggaatgggacgcgaacatttgttgtgacgaagaaagttcgtgaaagcgagatcgtcacatcgttctatctcaaacccgaagacgaaggcccgctgccaccgttcaaaccggggcaatacatcacggtccacatggatcacccgcacacgccaacttccccacgcaactacagcctttcggattgtgccagccaaccgcactatcgaatcagcgtcaaacgtgaagagcgactcgtcccggatgcgcccgacggtttgatttccaatcatttgcatgatggcatcgaagagggacaccgcatcgaacttggcccaccgtgtggtgagttcacggtcgatccagcaacgattgcaaaaccgatcgtgctgatcgcgggcggcattggtgtgacgccactattgtcgatggcgaaatcaatcgttcatgccaatcccaacgcggagctgcacttcattcaagcggctcggaacagcaaggtgcacgcattcgccgatgaacttcgccgtctggcacaagccggacccaatgttcacaccaaggtcatctatgactcgccgcttccaggagacgtggaagaaggcaagtgcgatgaggccggatttgtcacggaaaatcaaatacgagagtcgacgccttttaccgacgcggacttttacttttgcggtcccaagccgttcatgaaaaatgtccattcctgcttgcgggagcttggtgtcgacgagcaccgcgttcggtacgagttctttggacccaaagaagaattggtcgcggtgtga

SEQ ID NO: 70 - DNA, 1317 bp, Pirellula sp.
gtgtctccatcgttgtttttcgctgctattttctgtggaagctgcttccttctgttcgtcggtagcgccgacgcgatcgaagaatgggaatggaaacggctgacgcgaaaacggcttccaaaacttcgcagtggcaaagctattgatgccgtatcagcaaagctggctgatcagtccgcttcagcagcgaagcccgatgtgacgaaccatccaagtcgttggaaaggctggcggtcggcaagcgttcaatcggtcaaagacgaatcgctggattgtcgctccttcgtttttgttcctaccgatggggaaccgttcccgccatttttgggcggtcagtacctgacagtccgattgaaggatccgtcgtcaggcaagaatgtttcgcgttgctacagcctttcgagcggacccgatgaaccgcactatcgaatcacggtgaaacgggttccgggcgggacgatgagtaatctgctgcacgacacaattgatgttggcgatcggatcgagattcaagctcccaagggcaggttccattactcggtggaggagagccaaagcgccaatctagagccactgaatttggtcgccgcgggcatcgggatcactccgatgctctcaatgctgtttcaaagtttgaacgaacggacggaccgcgacgtcaatttgttctatcaagtaagaaatgcagtcgatgcacctttcctggcaccgattcgcgagatcgcgaaaatgctggaagccaccacaggagttcgcgtgcatctttggttcagcaaaccggaagacgacgatttgcgaccgggtgactcggttggacggttgtcagcggagcggatcgtggaacgtctcggtcatcaccgcggcgaatatttgatttgcggaccagatgtgttcatgaacgcgattgccgaagggttgatcgagtgcggagcgtccgccgatcgtgtgatgtttgaatcgtttggcgggaagtctaaatcggcgggagcgttggcggttccggcgtgcgacccttgttctgatgcgtcggacgttgatgaatcaaactcagatgactctgttggttggaacgtgacgtttcagaccagcgggaagtcggcttcgtttgaggctggaatggacggtttgttggacgtggctgaatcattggacgtggatgtcgattcagggtgtcgttcgggagattgtggagcttgcgtccgtcgtttgctctcaggcgaagttcgttatgccgagacacctgagtgcgacgtcgaagatggcgaagcggttttgtgcgttgccaaaccggtcagcgaagtcgtcgtcgacgcttga

SEQ ID NO: 71 - DNA, 1212 bp, Deinococcus radiodurans
atgctgacccccgaacagaaagccatcgtcaaggccaccgttcccgcgctggaagcgcacggcgagacgatcacccgcaccttctacgcctcgatgttcgccgcgcaccccgaactgctcaacatcttcaaccccgccaaccagcagaccggcaagcaggcccgcagcctggcggcgtcggtgctggcctacgcggcacatatcgaccatccggaggcgctgggcggcatggtggggcggattgcccacaagcacgtcagcctggaagtcctgcccgagcattaccccatcgtgggccagtacctgctcggcgcgattgccggggtgctgggcgacgccgccaagccggagattctggacgcctgggccgccgcctacggggagctggccgacctgatgatcgggatcgagaagggcatgtacgacgccggagccgggcagcccggcggctggcgcgacttccggcccttccgggtcgcccgcaaggtggccgagagccgcgtgatcacctccttcgtgctcgagcccgtgggcggcggggcgttgcccgcctatcagccggggcagtaccttagcctgaaggtgaaggtgccggggcaggagcggtggcaaatccggcagtacagcctctcggacgcgccgagcccggaccactaccgcatctcggtcaagcgcgagggcggcgggctggtgtcggagtacctgcacggcgcggtgcaggagggcgacgaactgctcgttcacgttccggcgggcgacttcgtgctgcaacagagtgagcgcccggtggtcctgatcagcgcaggcgtgggcatcaccccgatgctggcgatggtgcagacgctggcccaggcggggtcgcagcggcccgtcaccttcatccacgcggcgcagaacggctccgttcacgccttccgcgacgacgtggcgcggctgacgcacgagtacccgcactttcgcaaggtggtcttctacgacgaggccggccccgacgaccagctcggcacccaccacgacgtggccgggcgcctgagcctggacgccgtgcggggcgcgctcccggcgggtgaggccgagttctactactgcggtccggcgggcttcgccggggcggtggaagccatactcgacgacttgcaggtgcccgccgagcgacgctttaccgaaaccttcgggccgagccagagcttcgcgccggtgattctgggctga

SEQ ID NO: 72 - DNA, 975 bp, Methylococcus capsulatus
atgacgagcatcacctacggcggaaacacttatccccttgacaaagaccagtctgtcctggattgtctcgtcggccacggcgcgcctgtccccttctcctgtcgcagcggggtctgccagacctgcctgatgcgggccgtccgcggcgtgccgcccgaggactcgcagcgggggctgaaagactcgctgaagcttcagaactatttcctcgcctgcgtttgccatccgaccaacgatctcgaagcggcgcttccccaagaggtcgtgagatcactaccggcgaccgtcacggcgctggaaccgctcaacagcgagatcatgcacgtgtcgctcgaatgccacgccccgttggaataccgggccgggcaattcatcaatctgttccgcgaacccacgctcgggcgaagctactccctggccagcgtgccgcagcacgatgagcatttacacctgcacgtgcgacgactgccacaaggcaaagtcagcggctggatacacgaacacctgcgcatcggccagacggtggaaattcgggggccgagcggcgactgtttttacgtgcccggccggccggagcaggagctggtactgataggcacggggtccggcctggcccccctctacggcatcctgcgcgacgccctgcagcgaggacacagcggaccgatccgtctgttccacggcagtagaaaccgggcgggcctttatctgaccgacaggttgagggaactggcgagggaatatccgaatttcgactacgttccctgcgtttccggcgaagaaccggcgcctggcttggcggcaggccgcgcccacgagattgctttcatggagatcccggacttcaaggacaagcgtctgttcctctgcggccatccggagatggtgagcgcggcgaaaagacgcgccttcctggcgggtgctgcgatgaaggacatctatgccgatccgttcaacgtgaacgcagccccctag

SEQ ID NO: 73 - DNA, 1191 bp, Photorhabdus luminescens
atgctggataaccaaactattgcaactgtcaaatcaactattcccctactttccgcgactggcccaaaactgacagcacatttctatgagcggatgtttaaacataatcctgagttgaaaaacatctttaatatgagccatcagcttaacggcgatcaacgtgaagccttgttcaatgcgatctgcgcctatgcagccaatattgataacttaaaggtactactacccgcagtggaaaagatcgctcataaacacgcgagtttgaatattcaaccagagcattatcagattgtcggtactcacctgctggcaacgttgaatgaaatgttccagccgggaaatgaaattctggacgcctggggaaaagcttacggtgtgctcgctgatatttttatcaatcgtgaagagcaaatctatcatagtggtgaattaacagatggtggctggcgtggtttacgcccattccgtatcaaccggaaagaagtaaaaagtgaggtcatttgcagctttgaatttgcaccacaagatggtgggaaagtaatggactataagcctggccaatatctaagtatttatctgcaagatgatagttttgctaaccgagaaattcgccagtattcactaacggcagcaccaaacggctccagctaccggattgcgattaaacgtgagccacaaggaatcgtttccaaccatatgcacgataagatgcaagaaggcgataccgtctggctgaccgccccacgcggtgattttttccttgatattaaaccagaaacgccggttactttaatttctgcgggggttggcctgactcccatgatgagcatgttgtatcacctccaccagcaaaatcacaatagcccgattaattggttacatgcggcggaacacggcggtcatcacgcgtttagccatgaagtcgcagcgatcgcgcaagcaatgccgaattttgctggcacaatttggtatcgcgaaccaagggatgaagatcaacaaggtattcattatcaacacaaaggttttatggatctgacggttctgaatgaggcgttgaaaacagaaggaatgcatttctatttctgtggcccagtcgcctttatgcaatatgtcgcgaagcagttattagatatggggatagataaacaatttattcactatgaatgttttggtccacataaagtgatttaa

SEQ ID NO: 74 - DNA, 1185 bp, Vibrio cholerae
atgctcacccaagaacacatcaatatcattaaaagcaccattcctttgctggagtctgcaggtcctgcgctgacgcaacatttttaccaacgtatgttcagccataatccagagctgaagcatatttttaatatgacccaccagaaaaccggacgtcaaagtgttgcgctgtttgaagcgattgcggcttatgccaagcatatcgataatttagccgcattaaccagtgccgttgagcgtatcgcccataaacacaccagttttaatattcagccagagcattatcagattgtcgggcatcatctgctggagactttgcgtgaattagccccagatgcctttacccaaccggttgaagaggcttggaccgccgcgtatttctttttggctcaagtttttatcgaccgcgaaggcgcactctacttagagcgcaaacaagctttaggtggatggcgtgatggccgaacctttgttgtacgcgagaaacaggtagagtctgcttacgtgaccagttttgtgctcgtacccgctgatggtggtgcggtactggattatcaaccgggacaatacattgggattgaagtgacgccagagggaagtgattatcgagaaattcgtcaatactccttgtcgcatgcatcgaatggtcgtgagtatcgcatttcggttaagcgcgaaggggtgggcagtgataatccagggctggtttctcactatctgcacaacaacgtcaaagttggggatagcgttaaactctatgctcccgccggagattttttctatgttgagcgtgagcggcctgtggttctgatttcggctggtgttggcgcgacgcccatgcaggctatcctgcacaccttagccaagcaaaataagtctggagtgacttatctttatgcgtgtaattctgctaaggaacatacttttgctcaggaaaccgcgcagctcattgcgcaacagggatggatgcagcaagtgtggtaccgtgatgaaagtgcagatgatgtcttacaaggtgaaatgcagttagccgagcttattctgccgattgaggatggagatttctatttgtgtggtccgatcggttttatgcagtatgtggtcaagcagttactggcgcttggtgtggataaggcgcgaattcattatgaagtgtttggtccacatgcacagcttgcggcgtaa

SEQ ID NO: 75 - DNA, 1215 bp, Chromobacterium violaceum
atgctgagcgaacaaacccgatccctggtcaaggccaccgtcccggtgctgcagcagcacggcgtggcgctgaccagccatttctaccgccgcatgttcgagcacaatccggaactgaaaaacgtgttcaaccaggggcaccagcattccggccagcagcagcaggcgctggcgatggcggtgctggcctatgcccggcacatcgacgacccgtcgccgctgctgccggtgctgacccgcgtcgcgcacaagcacgtcagcctgggcatacgcgccgagcactacccgattgtcggcaagcacttgctggcgtcgatccgcgagttgctgggcgaggcggccggcgacgatctgatccaggcctgggccgaggcctacggtttgctggcggatacgctgatcggcatcgaaaacggcatgtacggcgacgccaccagcgccgacggcggctggagcggctggcggccgttccgcgtggcgaagaaggaaatcgagagcgaggagatcgcgtcgttttacctggagcccagcgacggcggcgcgctgccggcgttcaagcccggccagtacgtgtcggtgaagcgcttcgtcgccgagtgggggctgagccagccgcgccagtacagcctgtccgacgcgcccaacggcgaatacctgcgcatctcggtcaagcgcgaagacgcggcgcagggcaagccggcggggcgagtatccaatctgttgcaccgcgaggtgcaggtcggcgatgtgctggagctgagcgcgccgcagggcgatttcttcctgcatgaggaacgcgacggtccggcggtgctgatcagcgccggcgtcggccagacgccgatgcaggcgatgctgggccagttgctcaagcgcggcggccgcgaagtgcgcttcctgcacgcggcccgtcacggcggcgcgcatgcgatgggcgccaaagtgcgccagctggccgatcgccatccgcaactgaaggtccacgtttgctacgagacgccgcgcgcgcaggatgcgatcggcgtcgactaccaggctgcggggcggctgaacctggcggatgtgaagggcatcgcgctgttgccggacgccgactactatctgtgcggcccgctgggcttcatgcgcgcgcagcgcgacagcctgcgcggcctgggcgtggccgccgaccgcatccattacgaagtgttcggctcccatcccggcgacgattga

SEQ ID NO: 76 - DNA, 1983 bp, Chromobacterium violaceum
atgtccgactcccctcccatcccctggcactccggcgaacgggaaatgcaacgccgcgccggcagcctggagcacatggcggcgacaggcccacgcgtggtgcgcgaccacatgccggaacagcatcgcgacttcttccgccaactgcccttcatggtgatggcggcggtggacgaggccggcaggccgtgggcgggaatcgtcgaggggcgccccggcttcgtcgactcgcccgatccccgcagcctgcgcatcgccgcgcagcccagtcccgccgacccgctgcgcgactgcctgcgtcccggcgcggcggtgggcctgctcggcatcgagctgcatacccgccgccgcaaccggatgaacggcgaactgacggcgatggacgacggcggcttcgccgtcgccgtcggccaatcgttcggcaactgccccaagtacatccagctgcgcgagttcgaattctcccgcgagccgggtccgcgcatcctgggttcggtcgagtggatggacgagcttgacgacgacgcgcgcgccgccatcgccgccgccgacaccttcttcgtcgccagcgccgttcaagacagccatggccgctggcaggccgacgcctcgcaccgcggcggcaagcccggcttcgtcaagatggatggcgacacgctgaccatccccgacttcgccggcaacggctatttcaacaccctgggcaatctgctgctgcagccgcgcgccggcctgctgttcgtcgatttcgccagcggcgacacgctgcagctggccggccgcgccgaggtgccggacaccgagaccccgccgccgttcgccggcgctgagcgctggtggacctttcgcgtcgagcgcgtggtccgccgccgcaacgccttggccctgcgctggacgctgcgcgaatactcgccgttcgcgctcgccaccggcgcctggccgcacgccgcgccggagcggcaatggctgccgctgcgggtggtccatgccgaggacgagagcgacgccgtccgctccatttatcttgagccggccgacggctcggccccgccgcccttcctgcccggccagcacctgagcctgaaagtcgcgggcgtggacggcgtgcggatgcgcaactacacgctgtcgcaaaccggcggctaccgcatcagcgtcaagcgccagggcaaggcgtccgcccggctgcaccagctggcgccgggcgacatcgtcgaggcgctgccgccgcgcggcgacttcacgctggcgcgcgccgaccgcccgatcgcgctgctggccggcggcatcggcatcaccccgctgctggcgatgctgcaccagctgacggcgcgtcccgccgccatgccgcccacgctgctggcctacgccacccgcaccatcgccgagcgcgcgttcgacgccgagctggaagcgctgcaggccaaggccgccggccggctgcgcatcgtcaaggcggcgagccagccggaaaccggacgccgcctcggcgtcgactaccagcatgccggccatgtcgatatcgacctgctgcgccgcaatggcctgagcctggatggggacttttatctgtgcggcccggccggcttcatgcaagcgctgtacgaacagttgatcgccgcgggcgtggacgataagcgcatccacgccgaagccttcggcccggccggtatccaacggatcggccaggtcgcgggcaagcggccgccgccggccgaccatgccgtgccggtgcgtttctcggcatcgtcaatcgacgccgaatggcggccgggccagagcctgctggagctggccgagtcctgcggcctgaaccccgacttcagctgccgcggcggcgcttgcggcagttgccgcgccgccttgctgtccggcgaggcgacctatctgcagccgccggaatacgccgcccgatccggggagattctgctgtgctgcgcctacccggccgaaggctcgggcaagctggaaatcaacctgtaa

SEQ ID NO: 77 - DNA, 3372 bp, Bordetella bronchiseptica
atggagcaagtcacggggtactgcacgctgtgccggtcgcgctgcggatccgtcaaccacgtcgagaatggccggctggtcgccgtgacgccgcttgccggccatcccacgggcggggccttgtgcgccaagggccgcgcggcgccggaaatgatggccgaaagccatcgcctgctgcgcccgctcaggcggaccaatccgcgcggcgcggccgaccccggctggcgggaaatcgagtggtccgaagccctggacgaagtggccgcgcggctggcggtcgcgcgccggcgcgatggcgccgaaagcgttgccttcgccgtcaccacgcccagcggcacgcccatggtggacagcttcgagtgggtcgagcgattcgtgcgggtgttcggcagccccaacctgatctacgcggtcgaggtctgtggctggcacaaggactatgcccatgcgctgacgttcgggcgcggcatcggcgtgccggacctggagcataccgacaccatgctcctgtggggccacaaccccgcgcggacctggctggcgcaggccgcgcggatcgcggcggcgcgccagcgcggggcaagggtggtggtggtggatccgaatcgggagggatccagccagcaggcggacttgtggctgcgggtgcgccccggcgccgatggcgcgctcgcgctgggcgccatacgccacctgctgcataccggccgcttcgaccacggcttcgtggcgcgctggagcaacgggccgtacctggtggacggcgcaagcggcgccttgctgcgcgccgcggatttgtggcccgacgccgacccggccgcgcgggtggtgatgctggacggcaggccggccgccagcggccgcggcgcggataccgcgcgggccgagctgttcggatcctggaccttgcgcctgcacgacggccgcgcgtgcgaggccgtgacggtcatgcacgccttgcgggttgcggtggagcgctacacgccggacgaggtcgccaggctggcctggctggacgaggccgagctggcgcaattcaacgccatcttcgagaacgcgccccggctgtcctatcactcctggaccggcgtcggccagcataccaacgccacccagaccgaccgcgccatcgccacgctatacgccttgacgggcgcatgcgacagaaagggcggcaacctgtggaccgtggcgccgccgtatcgcgccgtcaacgggtatcgggagctgctgtcgccggtgcaacgcgccaaggcgctggggctggacgaactgcctctcgggccgcccagcctgggatggatcacggcgcgcgacttctgccgggccgtcctgcaacaggacccctatccggtgcgcacgctggtcagcttcggcacgaacctgctggtctcgcaggccgagaccgcccgcaatctggaggcgctgcaggccctggacttccatgtgcacgtcgacatgagcatgaacccgaccgccatgaacgcggacatcgtcctgccggccaacatgccctgggagcgcgaagcgctgaagctgggtttcgagatcacgcaggcggccgtggagcatgtgcaactgcgccccaggatggtggagcccgccggcgagtcgcgcgcggactacgagatcgtgctggagctggcgcgccgcctggggctgcgcgatgcgttcttcggcgcggacatggatgcgtgctggaaccaccagctggcgccgttgggtatcgatgtgcaggccttgcgcaggcagcccgagggcatccgctttccgcagccgtttgcccacgaaaagtacaagaccctgcgcgacgggcagcccgtcggctttcccacgcacgacggcagggtgcagatccactgcgcggccctgcacgacatcggccagcccgcgctgccttcccatgtcgagccggccgacacgccggcgcggcatgccggcgcatacccgctggtgctgagcacggccaagagcggctggttcgtgcattcgtcgcatcggtatgtggcgtccttgcggcgtaaatcgcccgatccgcaggtgtacctgagcaccgaggccgcgcgcgaccggggcatagccagcggcgactgggtgcgcgtgcgcacgccctacggcgaagtcgccttgcgcgcgaaaatcaacgccgacctgcacgccaacgtggcgatcgccgagttcggctggtggcagggctgcgagggcctggggcgcgccgacggcgccatcgtcgggcccgcgtccagcaatatcaacgccatcatgaccgatcgccaccgcgaccccgtcagcggctcggtgcccctgcgcgccacggtgtgcgacatcgtgcgcgacgacgcgcgcaaccgcggcagctggagcggcgcgcgcgaattcgtgctggcgcgaaagcgcggcatcgcgcatgacgtggcggagttccgcctgcttgcctgcgacgcgcaggcgttgcccgatttcctgccggggcagcacgtcatcgtctccatgcccggcggcgccgtgcggcgcgcctactcgctgaccggccccaatcgcgcacccgcccacctgtcgatcgccgtgcgccgtgtgcgcgacggcgacggccccgccgggctgatgtccaatgcgctgcatgcgctggacgagggcgcgcgcgtgctgctgtccgcgccggcgggcgtcttcacgccgcccttgcgcacggcgcggcccgtgatactgatggccagcggcatcggcattaccccttttcatggctacctggaagcgctggcgcaagacgccgggcctgccccgtcggtgctgctggtgcacgcctgccgcgatggttcgtcgcacccgtacggggccgagctcaagcggctggcgcagcgtatcgggtcggtgcgcaccctgaccgtgtatgccgagccggcaagccacgatgtgccgggccgcgattaccagcagcgcggccggctggatttcgcatggctgtcgccggagacggtggcggcgcggccgctggtctacctgtgcggctcgccgggttttctggcgttatgcaccgacgcgctggcggcgcgcggcatcccgcgtttcgacattttctcggaaacgttcaccagcgaaaaacgcgtgccggacaccctggcgccccagccgatcgagatcgaggcagagcagggcggcttcacctgggaccccgcggccggcaccttgctcgacgccgccgaacgcgccgggctgtccctgccgagcggctgccgcgttggccaatgcgagagctgcgccatgcacatcgtttccgggcaggtggcccacctcattgacttcgatggttccgcggacacctgcctgacctgccaggcggttccgatcacgcctttgacgctgcgcaggtaa

SEQ ID NO: 78 - DNA, 1209 bp, Bordetella parapertussis
atgttgagccccgaagtccgcgcgctggtcaaggccaccgcgcccgtcctgaaagaacacggcgaggcgctgacgcgccatttctatacgcgcatgctgggcggcaacccagagttgcgccagctgttcaaccaaggccaccagcaaagcggccagcagcagcaggcgctggccgccgcggtggcggcctatgccgagcatatcgacgatccctcggtcctgctgccggtggtcgagcgcatcgcccacaagcacgtcagcctgggcgtgcgcgcggaacactacgccatcgtcggcaagcatttgctggcctcgatccgcgaggtgctgggcgaagcggccaccgacgaactgatcgacgcctgggcggccgcctatggccagctggccgatctgctgatcggacgcgagcgcgcgctgtacgccgccgctgcctcccgcgacggcggctggaccggctggcgcgccttcaaggtggtgcgcaagacgccggaaagcgccgagatcacctcgttctacctggcgccggccgacggcggcgccactcccgactacctgccgggccaatacgtatcggtgcgggtctacgtgcccgagctgggcctgatgcagccgcgccagtacagcctgtccgaggcgccgggcatgccggggcaactgcgcatttcggtcaagcgcgaggccggctcgcccgccggcatggtgtcgggcacgctgcacaatcgcatcaacgagggcgatgtgctggacgtgtcgccgccgcagggcgatttcacgctggacgccgaggacggccggccggtggtgctgctcagcggcggggtggggctgacgccgatggtgtccatgctcaaccacctgacggcgcgcgacgacggccggcagatccgcttcgtgcatgcctgccgcgaggccggcgtgcatgcgatgaaggaacatatcaacgcgctggccgccaagcggccgaatgtgcgcaaggcggtgttctacgagcgcgtgggcgcggacgaccggcgcggcgtcgactacgactacgaaggccgggtcgatctgcatgcgatccgcgacgaggtgatcctgcccgacgcggactactacctgtgcggtccgttgcccttcatgcaggcgcaacggcgcgccctggccgacctgggcgtggccgagcaccgcatccatgccgaagtgttcggcaccggtggcgtggcatag

SEQ ID NO: 79 - DNA, 1209 bp, Bordetella pertussis
atgttgagccccgaagtccgcgcgctggtcaaggccaccgcgcccgtcctgaaagaacacggcgaggcgctgacgcgccatttctatacgcgcatgctgggcggcaacccagagttgcgccagctgttcaaccaaggccaccagcaaagcggccagcagcagcaggcgctggccgccgcggtggcggcctatgccgagcatatcgacgatccctcggtgctgctgcaggtggtcgagcgcatcgcccacaagcacgtcagcctgggcgtgcgcgcggaacactatgccatcgtcggcaagcatttgctggcctcgatccgcgaggtgctgggcgaagcggccaccgacgaactgatcgacgcctgggcggccgcctatggccagctggccgatctgctgatcggacgcgagcgcgcgctgtacgccgccgctgcttcccgcgacggcggctggaccggctggcgcgccttcaaggtggtgcgcaagacgccggaaagcgccgagatcacctcgttctacctggcgccggccgacggcggcgccactcccgactacctgccgggccaatacgtatcggtgcgggtctacgtgcccgagctgggcctgatgcagccgcgccagtacagcctgtccgaggcgccgggcatgccggggcaactgcgcatttcggtcaagcgcgaggccggctcgcccgccggcatggtgtcgggcacgctgcacaatcgcatcaacgagggcgatgtgctggacgtgtcgccgccgcagggcgatttcacgctggacgccgaggacggccggccggtggtgctgctcagcggcggggtggggctgacgccgatggtgtccatgctcaaccacctgacggcgcgcgacgacggccggcagatccgcttcgtgcatgcctgccgcgaggccggcgtgcatgcgatgaaggaacatatcaacgcgctggccgccaagcggccgaatgtgcgcaaggcggtgttctacgagcgcgtgggcgcggacgaccggcgcggcgtcgactacgactacgaaggccgggtcgatctgcatgcgatccgcgacgaggtgatcctgcccgacgcggactactacctgtgcggtccgttgcccttcatgcaggcgcaacggcgcgccctggccgacctgggcgtggccgagcaccgcatccatgccgaagtgttcggcaccggcggcgtggcatag

SEQ ID NO: 80 - DNA, 3387 bp, Bordetella pertussis
atgggcaagggcaacatgaagcaagtcacggggtactgcacgctgtgccggtcgcgctgcggatccgtcaaccacgttgagaacggccggctggtcgccgtgacgccgcttgccggccatccgacgggcggcgccctgtgcgccaagggtcgcgcggcgccggaaatgatggccgaaagccatcgcctgctgcgcccgctcaggcggaccaatccgcgcggcgcggccgaccccggctggcgggaaatcgagtggtccgaagccctggacgaagtggccgcgcggctggcggtcgcgcgccggcgcgatggcgccgaaagcgttgcgttcgccgtcaccacgcccagcggcacgcccatggtggacagcttcgagtgggtcgagcgattcgtgcgggtgttcggcagccccaacctgatctacgcggtcgaggtctgtggctggcacaaggactatgcccatgcgctgaccttcgggcgcggcatcggcgtgccggacctggagcacaccgacaccatgctgctgtggggccacaaccccgcgcggacctggctggcgcaggccgcgcggatcgcggcggcgcgccagcgcggggcaagggtggtggtggtggatccgaatcgggagggatccagccagcaggcggacttgtggctgcgggtgcgccccggcgccgatggcgcgctcgcgctgggcgccatacgccacctgctgcataccggccgcttcgaccacgacttcgtggcgcgctggagcaacgggccgtacctggtggacggcgcaagcggcgccttgctgcgcgccgtggatttgtggcccgacgccgacccggccgcgcgggtggtgatgcaggacggcagcccggccgccagcggccgcggcgcggataccgcgcgggccgagctgttcggatcctggaccttgcgcctgcacgacggccgcgcgtgcgaggccgtgacggtcatgcacgccttgcgggtagcggtggagcgctacacgccggacgaggtcgccaggctggcctggctggacgaggccgagctggcgcaattcaacgccatcttcgagaacgcgccccggctgtcctatcactcctggaccggcgtcggccagcataccaacgccacccagaccgaccgcgccatcgccacgctatacgccttgacgggcgcatgcgacagaaagggcggcaacctgtggaccgtggcgccgccgtatcgcgccgtcaacgggtatcgggagctgctgtcgccggtgcaacgcgccaaggcgctggggctggacgaactgcccctcgggccgcccagcctgggatggatcacggcgcgcgacttctgccgggccgtcctgcaacaggacccctatccggtgcgcacgctggtcagcttcgggtcgaacctgctggtctcgcaggccgagaccgcccgcaatctggaggcgctgcaggccctggacttccacgtgcacgtcgacatgagcatgaacccgaccgccatgaacgcggacatcgtcctgccggccaacatgccctgggagcgcgaagcgctgaagctgggtttcgagatcacgcaggcggccgtggagcacgtgcagctgcgccccaggatggtggagcccgccggcgagtcgcgcgcggactacgagatcgtgctggagctggcgcgccgcctggggctgcgcgatgcgttctttggcgcggacatggatgcgtgctggaaccaccagctggcgccgttgggtatcgatgtgcaggccttgcgcaggcagcccgagggcatccgctttccgcagccgtttgtccatgagaagtacaaggccgtgcgcgacgggcagcccgtcggctttcccacgcaggacggcagggtgcaaatccactgcgcggccctgcgcgacatcggccagcccgcgctgcccgtccatgtcgagccggccgatacgccggcgcggcacgccggcgcatacccgctggtcatgagcacggccaagagcggctggttcgtgcattcgtcgcaccggtacgtcgcttcgttgcggcgcaagtcgcccgagccccaggtgtacctgagcgtccaggccgcgcgggcccgcggcatagccagcggggattgggtgcgcgtgcgcacgccctacggcgaagtcgccctgcgcgcgaaaatcaacgccgatctgcacgagaacgtggcgatcgccgaattcggctggtggcagggctgcgagggactggggcgcgtcgacggcgccatcgtcgggcccgcgtccagcaatatcaacgccatcatgacggatcgccaccgcgatccggtcagcggctcggtgcccctgcgcgccacggtgtgcgacatcgtgcgcgacgacgcgcgcaaccgcggcagctggagcggcgcgcgcgaattcgtgctggcgcaaaagcgcggcatcgcgcacgacgtggcggagtttcgcctgcttccctgcgacgcgcaggcgttgcccgatttcctgccggggcagcacgtcatcgtgtccatgcccggcggcgccgcccggcgcgcgtactcgcttaccggccccaatcgcgaacccgcccacctgtcgatcgccgtgcggcgcgtacgcgacggcgatggccccgccggggtgatgtccaatgcgctgcatgagctggccgagggcgcgcgcgtgctgctgtccgcgccggcgggcgtcttcacgccgcccttgcgcacggcgcggcccgtgatactgatggccagcggcatcggcattaccccttttcatggctacctcgaggcgctggcgcaggatgccgggcctgccccgtcggtgctgctggtgcacgcctgccgcgatggttcgtcgcacccgtacggggccgagctcaagcggctggcgcagcgcatcggctcggtgtgcacgctgaccgtgtatgccgagccggcaagcgacgacgcgccgggccgcgattaccagcagcgcggccggctggatttcgcgtggctgccgccggcgacggtggcggcgcggccgctggtctacctgtgcggctcgccgggtttcctggcgttctgcaccgacgcgctggcggcgcgcggcatcccgcgtttcgacattttctcggaaacgttcaccagcgaaaaacgcgtgccggccaccctggcgccccagccgatcgagatcgaggcagagcagggcggcttcacctgggacccctcggccggcaccttgctcgacgccgccgagcgcgccggcctgtccctgccgagcgggtgccgcgtcggccaatgcgagagctgcgccatgcacatcgtttccgggcaggtggcccacctcattgacttcgatggttccgcggacacctgcctgacctgccaggcggttccgatcacgcctttgacgctgcgcaggtaa

SEQ ID NO: 81 - DNA, 945 bp, Bordetella pertussis
atgaaactcgtcgtccgtgccgtcactcccctgaccgccgaaatccgccacttcgagctggccgcgcccgacggcgccgccctgcccgcctacacccccggcgcccacctgagcgtgcatgtcgtgctgcccgacggcacgcccgcgcggcgcgaatattcgctgctgggcgacggctcggccaccgccagctacgagatcgccgtgcaatgccgcgagcccgcggcggggtcggcctggatgcaccggctggcccccggcgaccggatcgaggccgaggcgcccgtcaatgccttcgcgctggcggccgacgccgccgagcacgtgctgatcgccggcggcatcggcatcacccccattctcagcatggcgcgccatctgcgcggcgccggcgccgcgttcacgctgcattacgccggccgcgcccgcgccgccatggcgttcgccgaggaagccgcggccatgggcgctgcctgccgcctgtaccacgacgacggcgcgccgctgcacgaggcgctgccgaacatcctggccgcgccggcgccgggccgccacctgtatgtgtgcggcccgcgcgcactgatcgccgataccgtggacggcgcggccgcggcgggctggccgcccgccagcgtgcactacgaactgttccagggcgccctggccctgcgcggcgaccagcccttcgacctggtgctgcgccagtccggcatcaccgtgagcgtgccggccggccagatcatgctcgacgccttgctgcaggcgggcgtcgaacccctctacgactgccggcgcggcgaatgcggcatgtgcctgaccccggtgctggagggcaagccggaccaccgcgaccactacctgtcgccgcgcgagcgcgaggccggcgacgcggtgtgcgtatgcgtctcgcgtgcctgcggcgccagcctcacgctggacctgtga

SEQ ID NO: 82 - DNA, 1209 bp, Bacillus anthracis
atgttaagcgaaaaaacaattgaaatcgtaaagtcaacagtaccattattacaggaaaaaggcgttgaaattacaacgagattttatgaaattttattttcggaacatccggagttattgaatattttcaaccatacaaatcagaaaaagggaagacaacaacaagcgttagcgaatgctgtttatgcagctgcaacgtacattgataatttagaagctattattccagttgtaaaacaaattggtcataagcatagaagtttaggtattaaagcagagcattatccgattgtaggtacatgtttattacgtgcaattaaagaggtcgcaggtgcaccggatgaagtattaaacgcatggggagaagcgtatggtgtcattgctgatgcattcattagcattgaagcagagatgtatgaagaagcggcacataaagaaggtggatggaaagatttccgtaactttgtggttgttaaaaaagtgaaggaaagcgatgttatcacgtcattgtatttaaaacctgaagatggagggaaagtttcttcattcattccaggacaatatgtaacggttcaaataaatatcgaaggtgaaacatatacacataatcgtcaatatagcttatcagatgctcctggaaaagaatattatcgtattagtgtcaagaaagaaaaaggtgtagatacaccggatggtaaagtatctaattacttacatgatcatgtaaaagaaggtgatatgttaccagtaagtgcaccagcaggagatttcgtattaaatatggattcaactttaccagttgtcttaattagtggtggagtaggtattacaccaatgatgagtatgctaaatacgttaattgaacaagattcaaaacgtaatgtatgttttgttcatgcagcgataaatagtaatacacatgcaatgaaagaacacgttgaggcagtagataatgaatacgaacaagttaaagcatatacttgttattctgcaccaactgaaaaagatttagaaatgaagaactttgataaagaaggttttgtggaaagagaatggttacaaactattattccgacaactgaagcagagttttatttctgtggtccagtaccatttatgaaacatataaatgctgtactaactgatttaggtgtgaaacaagaacatattcattatgaatttttcggcccagcagcaagcttacaataa

SEQ ID NO: 83 - DNA, 1089 bp, Mycobacterium avium
gtgaggatgactatggcacaagcgatttgggaaaacattccggccgacctgtacggccgccgcaaacgcgaccggatgtacacggcgttgtacggcgtgggtgcgctgttcggcggcctggcgtcggcgtcgcggtggacacccgcgcgggtggttccggtgcgccggaccaccaccgcggtggtcacccagcgcgaggagctcgcacccgacgtggtcgccttcacgctggccgacccgcacggcggcctgttgccgtcctggacgccgggcgcgcacatcgacgtccggttgccgtcgggccggcgccggcagtattcgctgtgcggcccgcccggacggcgcaccgactaccgaatcgcggtgcggcgcatcgaagacggcggtggcggctcgatcgagatgcacgacaccttcagggtgggcgacgccctcgagttcgagggtccccgcaacgcgttctatctcgtcaccgacgagcgtgacgtgttgttcgtgatcggcggcatcggggtgacgccgatcctgccgatgatccagaccgcccagcagcacgggatcaattggcgcgccgtgtacgccgggcgcagccgcgacgacatgccgctgctggacgaggtcgtggccgtggcgcccgagcgggtcagcgtgtgggccgacgacgagcgcggccgaatccccaccgccgcagacctgctcgccgaggccgggccggcgaccgccgtgtacgtgtgcgggcccaccgccatgctggaagcggtgcgcaccgcgcgcgacgaacacgccgacgcgccactgcactacgagcggttcgggccgccgccggtggtcgacggcgtcccgttcgagctggaactggcccgctcgcggcgggtgctcacggtgccggggaaccgctcggcgctggaagtcatgctcgaccgcgatccggccaccccgtattcctgccagcagggattctgcggcacctgcaaggtgaaggtgcttgccgggcaagtggatcggcgcgggcgcaccgtcgagggcgacgacgaaatgctggtctgcgtctccagggcgaaaaacgaccgcctggtcatcgacgcctga

SEQ ID NO: 84 - DNA, 1155 bp, Exiguobacterium sp.
atgttaactccatctgcgatcaccatcatcaaatcaaccgtcccggtgcttgccgaacatggtcacagcatcacacgtgtcttctatcagcgcctgtttgaaaatcatccagaaatgaaacatatctttaatcaatcgaaccaaaaaaatgaccgtcagtcgcaggcgcttgcgacagccgtctatgctgccgccgcttacatcgatcagcttgagacgttgaaaccgacgttactgccggtccttcacaaacaccgcagcctgcagatcaaaccgtacatgtacgacatcgtcggaacggaactgattggtgcgattcaagatgtcctcaaagacgcagcgacaccggacatcatcgacgcctggacagccggctacggggaaatcgccaagctgttcatctcgctcgaagcggaactgtatcaacaggatgaacaggcaacggactttgaagggtatcaaccgttcgttatcgaaacgatgacgactgaatcaagcgacatcaaagcgtttacgttacgtccggcagacggacgaccacttgctccgtaccaaaccggtcaatacgtcacagtccgcctgcaggcaccagacggcttatggcaaaatcgccaatacagtctgacgacagtcgccaacggcacatcgtacacgatcggtgtcaaacaggacgggtctgtctcacgtcagctgcacggtctgtccgtcggtgaaaaggtcctgctcagtgcaccggccggttcgtttacattaacggacgcttcgactccgttcgtcggtcttgccggcggaatcggtttgactcccctcctcgcgatgaccgaagcggcccttgcggttggtcgtaaaacgacgttatacgtcgccgtccaggacgatctcgaccgcccgttcgccgaacaattggcccggtttgaagaacagggagcaacaatcatccgctatgcggaacgtaatgccttaccgggtacaacaccgggacgcttgtcggtggctgatgtcacgaacattgatccggcggccgacacgtatgtctgcggaccggaagcgatgattcagttcgttcgccgctactttagcggtcaagcggacaaattgcacttcgaagtgttcggaccaagtctggcactcgaagcaccgaccgccgtttcttaa

SEQ ID NO: 85 - DNA, 1176 bp, Ralstonia eutropha
gtgctgcgtgaacatggcctcgccatcactacccatttctaccgcgagatgttcgcggcgcgccctgaactgacccaactgttcaacatgggcaaccaggccaacggctcgcagcagcagtcgctcgcctccgccgtgttcgcctacgccgccaatatcgacaacgccaacgcgcttgcgccggtggtcgaacgcatcgtgcacaagcatgcagcggtgggcctgaagcccgcgcattacccgatcgtcggccggcacctgctgggcgccatctccgccgtgctcggcgaagccgccacgcccgatctgattgccgcctgggacgaagcgtactggctgctggccggcgagttgatcgccgccgaagcgcgcctgtaccagagcaccggcatggccgccggcgaacgcatcgccgtacgggtcgaccgccgcgaagtgcagagcgacaccgtggtcgcgctgacgctgtcggccgtggacggccagccgctgcgcgatttccgcccgggccagtacgtcagcgtcgaagtcacgctcgatgacggcaaccgccagcagcgccagtactcgctgtctgcggagcgcggcctgccgacgtggcaaatctcggtcaagcgcgaggacggcgaccacgccacgccggccggcgcagtatccaactggctgcatgccaacgcgcagcccggcacggaactgtcggtgagcgcgccgttcggcgacttcgcgccgcgcctggataaccaccgcccgatcgtgctgctgtcggccggtatcggcatcacgccgatgctgtcggtgctgcgcacgttggccgcacaaggctccaggcgcgagattctgtttgcccacgcggcccgcgacggccgccaccacgcccatcgtgccgacgtggcctgggccagggaacgcctgccgcagctgcgtacccatatcagctacgaacagccgcaagccgccgatgtcgcgggccgtgactacgaccacgcgggcaccatgcccgtcgccgcactgctcgatgcgcccgacaaccgtctgtttatcgacggcgacttccacctgtgcggaccgctcgggttcatgcaggcgcagcggcacgcgctgatcagcgctggtgtcccggtcgggcatatccaccgcgaagtgttcggcccggatctgctcgacgacctgttgtaa

SEQ ID NO: 86 - DNA, 3429 bp, Ralstonia eutropha
atgagcgaagtagaaaagaaggggttctgcacgttgtgccgttcccgttgcggtacggtcaacgtcgtcgacggcgagacgctggtcgcggtccgccccgacggcgatcaccccaccggcaaagcgatgtgcctgaagggcaaggctgccccggaactggtgcacagcgccgatcggatcctgtacccgatgcgcaggacccatccgaaaggggcggacgacccgggctgggtacgcatttcctgggacgaggcgctcgatgaaatcgccgcgcgccttctgcacgcgcgcgccacgcgcggcgccgagtccgtcgcgttcgcggtgacgacgcctagcggtacagcgctgtcggacagcatcgactggatcgagcgctttgtccgcctttatggcagcccgaacatctgctacgccaccgagatctgcaactggcacaaggacttcgcacacgccttcaccttcggctgcgggatgccgacggcggactaccgcaatgccgggctaatcttgctgtgggggcacaatccgaccaatacgtggctgtcgcaagccgaggcaatcggcgccggtcgggcgggcggggccaggcttatcgtggtggacccgcggcagacagccctggcggaggacgccgaccagtggctgcgcgtcaagcccggcagcgatgctgcgctggccatggcgctggccaacctgatgatcgaagccaatgctttcgatatcgattttgtcaggcgctggaccaatggcccgttgctcgtgcgccaggacaacggtgccttcctccgtgggggcgacatcggcctggcggatacggatgccctgctggtctgggacgcacgccagcgcatggcggtgccggccggcaaaggcgtcgatgacgcgcagcatatcgcgctgcgcggtacctttgccatcccgcggatcggcggcggcgagcggaagtcgctgctgtgccagccggccttcgacttgtatgccgcggagtgtgcacgctatacggtagagcgcgcggccgcgctcacgtggatcccggagggcgatatccggcatgcggcgagcctgatcggagcggcgggccgcatcgcgtatcacgcctggtccggggtcggtcagcatgagaacgccacacagacggagcgcgccattgcgtgcctgtatgcgctgacgggcagcttcgatcgccgcggcggcaaccgtgtctatagcaagccgccgttcaacgcggtaagccggttcgacttgctgagcccggatcaggcgcacaaggcgctggggctggatgcgcggccgctcggtccaccggcgcaaggctgggtcacggcgccggacctctaccgcgcgatcacgcatcacgcaccttatgcggtcacgtcgctgattgcattcggcacaaatacgctgttgtcgcagcccgatgtggccaacgcagagcaggccctgcgtgagctggagctctacgtgcattgcgatctcttcgagaaccctagcgcccggcacgcggacatcctgctgccagtgaacacgccctgggaacgcgagggcctgcgaatcggcttcgaggtgtccgccgacgccgagcagttcgtgcagttgcgccagcgcatggtcgcgccgctcggcgaatcccgctcggacaacgacatcgtgtttgcactggctgcgcgcatcggactcgacgaagccttcttcggcggcagccttgaagccggctggaaccacatgctggcgccgacggggctgaccgtggcggcgctgcgcgacgcccccgaagggatacgcgtgctggtcgaggatgtggagatgaagtacgcggccggcaccgacggtcagcctttcaacacgccgacggggctggtcgagctctactccgagcgcctgctccgtcatggctatccaccgctgcccggcctgccagaatcggcatggaacgatgcaggacagaccagtgcatcgtttccctatctgatgacgtcggcgaagaacggctactactgccacagccagcaacgcggcgtggcgtccttgcgccgcaaggcattgctgccgcagctcgatatctccagcgacatcgccgcggccaggaacatccgcacgggagatcccgtccgggtgtcgacgccggccggcagcgcgcgatttaccgcgcgggtccagccaggcctgcaccccgccgtggtggttggggagtatggatggtggcaagggtgcgaccccatggggcaacagcccaccgccgtgcttggcacggacagcgcaaacttcaacgcactgatcgatgcgacccggcaggatccggttagcggctcctcgccgctgcgatgctgccactgcaacgtggaacgcgacgccacgctcgacatacgacgcaggcgctgggaaggatatcgaccgttccgcatcgtcgggctgcgcaaggaggcaaccgatgtgactgcggtggacctggagccggccgacggcggccggctgccggactacctgccaggccaacacgtgaccatcaggctctgtgttgacacgggccaacaggaggtggttcgctcgtactcgctgaccgggcctgctgtcgtcgccgatcgccgccgctatgcgatcgccgtgcggcatgcgagggcgcggctcgccagcggcgaggtcgtgtccggcgtcgcctcgtccttcatcaacacgcgactggcgatcggcgacacgatcgagctgcgcgcacccgctggcacattcgtcatgccaacgcgtacagcaagaccgttggtcctgcttgccggcggcatcggcatcaccccgttcatcaatctgctggaatcgctcgtcggtcaacaggacccgccccggatgctgttgctgtatgcgaaccagaacggcaccacgcacgctttcagggacccgctgcgcgaactggaagcgctgatccccgcactcaaggtgatcaatttctatgacgctcccgcggacggcgacatccttggcagcgacttccaggtgcatgggcgcgtcactgcggcggctgtgccggacgcgctgctggcctcgcgtccgctggtctacatgtgcgggcccgacgccatgatgacggcgtttgccgccgggttggccgcgagaggcgtgccgcgcttcgatatccagaaggaagttttccgttcgccgacggtgcggcgaatcgaggcgagtcaggccttccaggttcagttccgcaggtctgacatcacgctttcgtggcgctccgagcatggccccctgcttggcttcgccgaggcgctgggcattcggctgcccagtggctgccgcgtcggccagtgcgagagttgcgccgtccggatcgtatccggaaccgtacaccacttgcatggcgaggcgcccgatgaccccggcgtatgcctggcgtgccaggcggtgcctgccagcgacctcgtcattgacgcatga

SEQ ID NO: 87 - DNA, 1116 bp, Methylobacillus flagellatus
atgctcagcgcccatcctgagctcaagaacctgttcaatatgggcaaccaggccaacggcatccagcagcagtccttggctgcagccgtattcgcgtatgccgccaacatcgacaatcccgcagcgctggcgcccgtcgtcaaacgcatcgtccacaagcatgctgccgtcggcatcaaaccagaacactaccccatcgtaggccaatacctgatcggcgccatcaagcaagtattgggagaggccgccaccgatgagctgctggctgcatggggcgaggcctattggtcattggccaatctcctgatcgaggaggaaaagtcgttatatgccagcacagccagcacggctggcgccctgatgacgctcaaggtcgcgcgcaaggtatttgagtcggaacacatagtctcgttttacctgcagcacccagacgggcgtaaacccggagattttctgccaggccaatacatcagcgtagagatgcaattcgagcaaaacaaaaggcgccagctcaggcaatacagcctctcggactcaagcacggctccgtggtggcgtatctcggtgaagcgcgagcaggaagcagaaaaaccggagggcctgctttccaactggctgcatgacgaggtcaaggtcggcgacttaattcacgccacaccggcatttggcgactttgttctggatcccgtcatcagcgaccagccattgctgcttatctcagctggaatcggcatcacccccatgctgtccatgttgaattcagtgcgcgacctcgccccgcagcgcccagtcttcttcgcgcatgcggctcgcagccctgcatggcaaagccatagcctggatctgcaagaggccaggtatcgtatgaccaatctgcaaacggctttattctatgaaagcctggaaggtgcacatggcagcatagggggagtgtatcaaggacgcatggatatcactgacttatggccggcggtcctgcatcatgccgatatctacctgtgtggcccactaggctttatgcaagcacaacgcgagcagttattgcaagcaggggtggcggcaagccatatcaagcgggaagtattcgggccagatcttctggaccacctgctgtag

SEQ ID NO: 88 - DNA, 1221 bp, Ralstonia metallidurans
atgttgtccgctgcttcccgcccctatatcgatgccagcgtccccgtgctgcgtgagcacggtcttgcgatcacgacacatttctaccgagagatgttcgcggcgcgccccgaactgaagcgcattttcaacatgggcaatcaggccaatggctcgcagcagcaatcgctggcctcggcagtgttcgcctatgcggccaacatcgatcgtgccgacgtgcttgcgcccgtggtcgagcgcatcgtccacaagcacgtggcggtcggattgacgccggctcactatccgatcgtcggcaagtatctgctggaagccattgccgccgtgctgggcgacgccgccacgccgccgctgctggccgcctgggacgaagcctactggctgctggccggcgaactgattgccgcagaggcccgactctatgaacgccatggcgtggcggcaggtgagcttctgcgcgtgcgcgtggtgaaccgcgagcaggagggggatcaggtggtggcgttgacgctggccgccgaagacggctcgccgctgcgtgacttcgcgccgggtcagtacatcagcgtcgaggcatcgttcgccgacggacgccgtcaactgcgccagtattcgctttcgggcgagcgcggcctcccgacgtggcgtatctcggtgaagcgcgaagatggcgcaagcgacgcgccggcgggtacggtatcgaactggctgcatgagaacgcccaggtcggcacgacgctgcacgtgagcaccccttggggcgatttcgcgcccgagctcgatagccgccagccgatcgtgctgatgtcggcaggcatcggcgtgacgccgatggtctcggtgttgcgcacgctcgcacacgaaaatccgcatcgaccggtgctgttcgcccatgccgcccgtcatggtcgtcagcacgcgcatcgtcgcgacctggcatgggcgcgcgagcggatgcccaatctgcgtacccatgtcagctatgaaacgccgcagtcggtggatgcctcggggcgcgactacgaccacgccggcacgatgccggtcgaggccctgctcaagtctggtgacaacgccgctttcaatgacgcccgcttctatctgtgtggcccgcttggcttcatgcaggaacagcgtcgcgcgttgatcgcctcgggcgttccagtcggacatattcatcgcgaagtgttcgggccggacctgctcgacgacatcctttga

SEQ ID NO: 89 - DNA, 1020 bp, Ralstonia metallidurans
atggaacatacgatcgccctgcagttcgaagatggcgtgacgcgcttcatcacgtgcggcgacaacgagacgctctcggacgccgcctatcgccagcagatcaacattccgctcgactgccgcgacggcgcgtgcggcacctgtcgcggcctatgcgaatccggccactatgacctgcccgaatcgagctatatcgaggacgcgctgaccgccgaggaggcggccaagggatacgtgctggcctgcaagacacggccgcgctcggattgcgtgatccgcgtgccggcttcgtccgcggcctgcaagactggcgtgacgcgattcgagggcgcgatcgccgccgtggcgccgctgtcggattcgaccatcggcttctcgatcgacctcgatgacccggccgcgctcagcttcctgcccgggcagtacgtcaacgtggaaatcccgggcagcggactaacgcgcgcgtactcgttcagttcgccgccgggcgcgtctcaggcggccttcgtcgtgcgcaatgtgccacagggccgcatgagcggctttctggccggcgaggcccagaccggacagcgcatggcattctccggcccgttcggcagcttctacctgcgttccgtcacgcggcccgttttgttcctggccggcggcaccggcatcgcgccgttcctgtccatgctcgacgtactggccgccagcggcagcacgcacccggtgcgcatggtctacggcgtcacgcacgacatcgacctggtggccaccgagcggctcgaggccgccgcggccagcatcgacggattcacctaccgcacctgcattgccgacgccgccagcacgcacgagcgcaagggctatgtgaccacgcatgtcgaccccacatggatcaatcacggggacgtcgacatctacctgtgcggccccgtggccatggtggaagccgtgcgcgactggctgcgggatgccggcatcacgccggccaatttctactacgagaagttctcggccagcgcggaggcatga

SEQ ID NO: 90 - DNA, 1182 bp, Burkholderia fungorum
atgctttccgccgaacaccgcgctatcgtcaaagccaccgttcctcttctcgagagcggaggcgaagcgttgaccacgcacttctacaggattctcatcggcgaacatcccgaagtgcggcccatgttcaacctcgcgaatcaggcaagcggcgcacagccacgcgcgctggccaacagtgtgctgatgtacgcgcgccacatcgatcagctcgaacaactcggcgggctggtctcgcagatcatcaacaagcacgtcgcattgaatatcctgccggagcactatccgattgtcggacagtgcctgctccgagccatccgcgaagtgctcggcgccgaaatcgcaacggatgcggttatcgcagcgtgggccgccgcgtatcgacaacttgccgatctgctgatcgggctcgaagaaaagatctacgccgagcgggaagcggcaccgggcggctggcgcggcacgcggctctttcgcgttgcacgtaaggtgcgggagagcgacgagatcacgtcgttctatctgcgccccgacgacaatggcgagttactcgcattccatccgggccaatatatcggcgtgcggctgtatatcgacggcgaagaagtgcgccgcaattactcgctctcggccatgtcgaatggctgcgaataccgtatcagcgtaaagcgcgaagcgaacggaaaggtgtccagccatctgcatacgcacctcaatgaaaacgatacgatcgaactgtttgcgccggccggcgacttcacgctcgaacctggcgacaagccgctcgtgctgattagcggcggcgtgggcatcacacccacgctggccatgctgcaagccgcgttgcataccaatcgcgtcgtgcacttcatccactcggcgcgtcatggcggcgttcatgcgttccgcgacacgatcgagcaactcgccgcgcgtcacccgcaattgaagcgtttctattgctacgaacagcgccgcgcggacgatgccgacgcagatggcatcggctatctcgacgaaacacgtctggacgcatggctgccggaaacgcgcgacgtcgacgtctatttcctcgggccgatcgcattcatgaaggcggtcaagaagcacctgaaggcgatcggcgtaccggaatcacaaagccgttatgaattcttcggcccggctgccgcactggaataa

SEQ ID NO: 91 - DNA, 2007 bp, Burkholderia fungorum
gtgggcgtggccgagcggatgcaggaagtcgggcggcgggtcattcgccgcctcatgcccgaccagcatcgcgcgttcttcccccaactgccgtttgtcgcgcttggcgcggtggatcacgagggcgacgtgtgggccacgctggttgccggtaagccgggatttctgcacgcgcctaccgcgcgcacgctgcgagtcgacctggtgcgcgacccgcacgacccggcctccgctggtctggacgatggcgaggcagtgggtttgctgggcatcgaactgcatacccgccggcgcaatcgcctgaatggtacggtgagccatagtgccggcgcgggtttcaatgtcgacgtgacgcagagtttcggcaactgtccgcaatacatccagatgcgcgatgccgaattcgttcgtgacccggcgagcccgccgcccgtcgaggccgtgcaactcgaacacctgtccgaacgggcgcgcacgatgatcgatacggccgatacgttcttcgtcgcgtcttatgtcgatgaccccgccggccgccaggtcgacgtctcgcatcgcggcggcaaggcggggttcgtgcgcctgagcgaggacggcgtgctgacgattcccgactttgcaggcaacctgtttttcgccacgctcggcaacttcgtcatcaatccccgtgcggggctagtcttcgccgatttcgaaagcggcgatctgttgcagctcacgggagaggcgcaagtcgatctcgactccccggaaattgcagcatttcagggcgcagagcgtctgtggcgtttcaagccgcgccgcatcgtttatcgcgcaggcgcgttgccgctgcgctggaaattacaggcgaacggctggtcgccgaactcgctgatgacgggcagctgggacgaggtggcgagccgcgtgaaagcgcaggcgctggctgacgcgtggcgtcccttcaaggtcactcaggtcgtcgacgaaagctcggtgatccgttcgttctaccttgaaccgctcgatggcgccggcctcattccgcacgcggcggcccagcatctgccgatccgcgtcacgctgcccggttgcaccaaaccggtaatccggacctatacgctgtccacagcgccagcggacggttcgtaccggatcagcgtcaagcggcaaggactcgtttccgcacatctgcacgatacgttgcgggtgggcagtgtcatcgaggcgcgcgcgccggccggccagttcaccatcgacgccgccgcacgccggtctgccgtgctgctcgcagcgggtgtcggcgtgacgcccatgctcgcgatgttgcggcacatcgtatatgaaggtttgcgtacacgccgcgtgcggccaacgtggttttttcattcggcacgcacgttggccgagcgcgccttcacgaaggaaatcgatcaactggcggcgagtgccggtggtgcggtgcgcgtggtgcgtacgctgaccgataccgagggcgcgcagatgggcaaggacttcgatgcttcaggccggctcgatgtcgaactcctgcgcgcgacactcccattcaacgactacgatttttacctgtgcggaccggcggggttcatgcagtcgctgtacgacgggctgcgcgagctgaatgtcgccgataaccggattcacgccgaggcgttcgggccggcggggttgcatcgtcgggcagacgccggcgcagacgcgggcctcgcgcatttgccggcggataaaccggtgccggtcgcgttcgtcaaatccggcaaggaagcacgctggaacccggacagtggttcgttgctggatctcgccgagtcgcggggcttgtcgccggaattcggctgccgcggcggcagttgcgggacttgccgcacgcgggtcctcgaaggagcggttgcgtatcctgtcgcgcccgagttcaaggtggcgagcgacgaggccctgatctgctgcgctgtgccggcgcaagccgggaccagtggcgccgaacgcctgctactggacctttga

SEQ ID NO: 92 - DNA, 1212 bp, Sinorhizobium meliloti
atgctcactcagaagaccaaggatatcgtcaaagcaacggcccccgtcctcgcgcagcacgggtacgccatcatccagcatttctataagcggatgtttcaggctcatcccgagctcaagaacatcttcaatatggcgcaccaggaacggggcgaacaacagcaagcgctcgcgcgcgcggtctacgcctatgcggccaacatcgaaaatccggagagcctttcggcggtgctgaaggatatcgcccataagcacgccagccttggcgtcagaccggaacaatacccgatcgtcggagaacatctgcttgcgtctatcaaggaggtgctgggagatgccgcgacagatgaaatcatctcagcgtgggcacaggcctatggcaatctggcggatatactggccggcatggagagcgagctctatgagcgctcggaggaacgtgccggtggctgggccggctggcgtcgcttcatcgtccgtgagaagaacccggagagcgacgtcatcacctcattcgtgctggagccggcggacggcggacccgttgcggatttcgaacccggacaatatacgagtgtcgccgtgcaggtgcctaagctcgggtaccagcagatacgccagtacagcctgtcggactctccgaacggacgcagctatcggatctctgtgaagcgagaagatggcggcttggggacgcccggctatgtctcgtccttgctgcacgacgagatcaatgtcggcgacgaactcaagctcgcggctccctatggcaatttctacatcgatgtaagcgcgactacgccaatcgttctgatcagcggcggggtcgggctgacgccgatggtcagcatgctgaagaaggcgctccagacgccgccgcggaaggtcgtgttcgtacatggcgcgcgaaacagcgcggtacatgcgatgcgcgatcggctgaaggaagcctcccgtacctatccggatttcaagctgttcatcttctacgacgagcccctgccgacggatatcgaggggcgtgactacgactttgcgggcctcgtcgacgtcgaaaaggtcaaggacagcatcctgctcgacgacgccgactattacatctgcggaccggttccgttcatgcgcatgcagcacgacaagctcctcggtcttggaattaccgaagcgcgcatccactacgaagtattcggtcccgatctgtttgccgagtga

SEQ ID NO: 93 - DNA, 1011 bp, Pseudomonas putida
atgagctaccagatcgcactgaatttcgaagacggggttacccgcttcatcgaggctaccggccatgaaaccgtggctgacgctgcctaccgccagggcatcaacatcccgctggactgccgcgacggcgcttgcggtacgtgcaagtgcaaggccgaatccggccgctatgacctgggcgataacttcatcgaagatgccctgaacgaagacgaaatcgccgaaggctacgtactgacctgccagatgcgggctgaaagcgactgcgtcatccgcatccctgcttcgtcgcagctgtgcaagaccgaacaggccagcttcgaggccgccatcagcgatgtgcgccaactgtcggccagcaccattgccctgtcgatcaagggtgaagcgttaagccgcctggccttcctgccggggcagtacgtcaacctcaaggtcccgggcagcgagcagagccgcgcctattcgttcagttcgttgcagaagggcggcgaagtcagcttcctgatccgcaacgtaccgggtgggttgatgagcagcttcctgaccaaccttgccaaagccggcgacagcatgagcctggcagggccgctgggcagcttttacctgcggccgatccagcgcccgctgttgcttttggctggcggtaccggcctggcgccgttcaccgcgatgctggagaaaatcgccgagcagggcagtgagcacccgctgcacctgatctatggcgtgaccaacgacttcgacctggtcgagctcgaccgcctgcaagcgctggcggcgcgcatccccaactttacctacagcgcttgtgtggccaacccggacagccagtacccacaaaagggctacgtgacccagcacatcgagccacgccacctcaacgacggcgatgtggacctgtacctgtgcgggccaccgccgatggtcgaggcggtcagccagtacgtgcgcgagcagggtattaccccggccaacttctactacgagaagtttgcggcggcggcctga

SEQ ID NO: 94 - DNA, 1179 bp, Pseudomonas stutzeri
atgctttgcgctgaacaaatcgcccttatcaaggccaccgtgccgctgctggaaagcggcggtgaagccctgaccacccacttctataagttgtggctagacgagcatcctgaggtacagccgctgttcaaccaggctcaccaggccagcggtgaacagccgcgcgcgctggccaacggcgtgctgatgtatgccaagcacatcgaccgcctcgaagccctcggcccgctggtaggccagatcatcaacaagcacgtagccctgcaggtgctacccgagcactacccgctggtaggctcctgcctgctgcgcgccattcgcgaagtgcttggtgaggagatcgccaccgaggcggtgatcgatgcctggggcgccgcctaccagcagctcgccgacatactcatcggccaggaggaaagtctctatcgggccaaggctgcggcggagggaggctggcggggcgcgcggccttttcgcattatccgtaaggttgccgagagcgaagagatcacttcctttcacctgcaacccgaagatggcggcccgctgatggactttctgcccggccagtacatcggcctgcgcctggaggttgacggccaggaggttcgccgcaactactcactgtctgccgcgagcaatggcagcgaataccgcatcagcgtcaagcgcgagcccggtggcgtcgcctcgaatgcgctgcatgccatgcccgaaggtgccgtactggagctgttcggccccgctggcgagttcaccctcgaaccgggcaacaaacccctggtgctgatcagtggtggcgtcggcatcacgccaaccctggcgatgctggagcaggcgctggccagcacgcgtccggttcacttcatccactgcgcgcgcaatgctggcgtgcatgcattccgctgcagcgtggatacgctggccgagcgtcatgcacagctcaagcgcttctactgctatgaggaacacgacggagcgggtgcagcgccggatgccgttggccgtctgaccgagcaacagcttggcgagtggctgccggaagaccgcaacgtggatgcctatttcctcgggccgaaacccttcatggctgccgtccgccgtcagctgaagtcactcggtgtgccggaacagcaaacccgctacgagttcttcggccccgcttcagcactcgattga

SEQ ID NO: 95 - DNA, 1182 bp, Azotobacter vinelandii
atgctgaccgagcaacaacgcgccatcgtcaaggccacagtcccgctgctggaaaccggtggcgaggcgctgaccagccacttctaccggatcatgctcgccgagcacccggaagtacgcccactgttcaaccaggctcaccaggccagcggcgaacagccgcgggcgctggccaacgcggtgctgatgtacgcccggcacatcgaccgcctggaggcgctcggcccgctggtggcgcagatcgtcaacaagcacgtgtccctgcaggtgctgccggagcactacccgatcgtcggcgcttgcctgctgcgcgccatccgcgaggtgctcggcgcggaaaccgccaccgacgcggtgctcgacgcctggggcgcggcctacgggatgctcgccgaactgctgatcggcgccgaggaagccgcctatgccgccggcgccgcggtaccgggcggctggcgcggcgcgcgggcgttccgcgtggcgcgccgggtggtggaaagcgaggaaatcgtttccttgcacctgcgtccggaagacggcggcgcgctgccggccttccggcccggccagtacatcggcctgcgcctggtgctcgacggcgaggaagtgcgccgcaactactcgctgtcggcggcgccgaacggcgaggaataccgcatcagcgtcaagcgccacgccaccggccgggtctcccgccacctgcatgagcaagtccgcgaaggtgaccgcctggaactcttcccgccggccggcgagttcgtcctgaacgattcggacaagccgctggtgctgatcggcgccggcgtcggcgtcaccccgctgctggccatgctggaggcggcgctgcccggcggccggccgatccgcttcatccattgcgcgcggcatgcgggcgtacaggccttccgccagcaggtcgaggcactggccggacggcacccgcagctcgaggcgttcttctgctacagcgcgccgcgcgccggggaccgcgccgacgccaatggccggctcgacgcgcagcgcctggccgcctggctgccggcggaacgcgatctggacgcctatttcctcggtccgaagtccttcatggcccaggtgaagcgccagttgcgcgaactcggcgtgccgcaggaacagtgccactacgagttcttcggcccggcacaggcgctggaagcgtaa

SEQ ID NO: 96 - DNA, 1011 bp, Azotobacter vinelandii
atgtcatacaaggttgcgctgaatttcgaagacggggtcacccgtttcatcgaggtggacagtggcgaaaccgtcgccgacgcctcctaccgccagggcatcaatattccgctggactgccgcgacggagcctgtggcgcctgcaagtgtcttgccgagtccggtcgttacgacctgggcgaaaactacatcgaggacgcactgagcgaggaagagaaggccgcgggcctggtgctgacctgccagatgcgtccggaaagcgactgcgtgctgcgcatcccggcctcctccgaagtctgcaagaccgaacaggccagctacgcggcggtcatcagcgacgtgcgcgcgctttctcccagcgtgatttccctgtcgatcaagggcgactcgctggtcaggctgtccttcctgccgggtcagtacgtcaatctcgaggtgccgggcagcgaccagacccgcgcctattccttcagctcgatgccacacgatggcgaggtcagcttcctgatccgcaacgtgccgggcggcctgatgagcggctacctcagccagcaggccagggccggcgacccgatgaccctgaccgggccgctgggcagcttctacctgcgcgaaatccgccggccgctgctgatgctggccggcggcaccggcctggcgcctttcaccgccatgctggagaagatcgccgaggggggcagcgcgcatcccgtgcacctgatctacggcgtcacccacgacgccgatctggtggaaatggaccgcctgcaggagttcgccgcgcgcattcccggtttcaccttcaccgcctgcgtggccagcccggagagcagctatccgcacaagggctacgtcacccagcacatcgagccacgccacctgaacgacggcgaggtggatatctacctgtgcggcccgccgccgatggtcgaggcggtcaacaagttcctccgcgagcagggcatccagccggccaatttccactacgagaagttcgccgccagcgtctga

SEQ ID NO: 97 - DNA, 1224 bp, Azotobacter vinelandii
atgagtaacgaaatattcctcgccatcggcatgttcaccgccatcgtgctggcgctggtggtgatcatcctcgccgcccgcgccaggctggtgtccagcggcgacgtgagcatcgagatcaacggcgagcgcagcattaccgtgccggccggcggcaaactgctgcagaccctggcggccaacaatatcttcctgtcctccgcctgcggtggcggtggcacctgcgcgcagtgcaagtgcgtcgtcgagtccggcggcggcgagatgctgcccaccgaggagtcgcacttcacccgccgccaggccaaggagggctggcgcctgtcctgccagaccccggtcaagcaggacatgaggatcgaagtgccggaagaagtcttcggtgtgaagaagtgggagtgcacggtggagtccaaccccaacgtggccaccttcatcaaggaactgaccctgcgcctgccggaaggcgagagcgtggacttccgcgccggcggctatgtccagctggagtgcccgccgcacgtggtccactacaaggatttcgacatccaggaggaataccgcggcgactgggacaagttcaacatgtggcgcttcgtctccaaggtggacgagacgacgatccgcgcctactccatggcgaactatccggaagagaaaggcatcgtcaagttcaacatccgcatcgcctcgccgccgccgaaccgcgacgacattccgccgggcaagatgtcttccttcgtgttcaacctgaagccgggcgacaaggtcacggtatacggtcccttcggtgagttcttcgccagggacaccgatgccgagatggtgttcatcggcggcggcgccggcatggcgccgatgcgttcgcacatcttcgaccagctcaagcgcctgaaatccaagcgcaagatgagcttctggtacggtgcacgctccctgcgcgaggccttctacgtcgaggagtacgatcagttgcaggcggagaacccgaacttccgctggcacctggcgttgtccgacccgcagcccgaggacaactggacggggctgaccggcttcatccacaacgtgctctacgagaactgcctgaaggaccatccggctccggaggactgcgagttctacatgtgcggcccgccgatgatgaacgcggcggtgatcaagatgctgctcgatctgggcgtcgaacgggagaatatcctgctcgatgatttcggcggctag

SEQ ID NO: 98 - DNA, 1212 bp, Sinorhizobium meliloti
atgctcactcagaagaccaaggatatcgtcaaagcaacggcccccgtcctcgcgcagcacgggtacgccatcatccagcatttctataagcggatgtttcaggctcatcccgagctcaaggacatcttcaatatggcgcaccaggaacggggcgaacaacagcaagcgctcgcgcgcgcggtctacgcctatgcggccaacatcgaaaatccggagagcctttcggcggtgctgaaggatatcgcccataagcacgccagcattggcgtcagaccggaacaatacccgatcgtcggagaacatctgcttgcgtctatcaaggaggtgctgggagatgccgcgacagatgaaatcatctcagcgtgggcacaggcctatggcaatctggcggatatactggccggcatggagagcgagctctatgggcgctcggaggaacgtgccggtggctgggccggctggcgtcgcttcatcgtccgtgagaagaacccggagagcgacgtcatcacctcattcgtgctggagccggcggacggcggacccgttgcggatttcgaacccggacaatatacgagtgtcgccgtgcaggtgcctaagctcgggtaccagcagatacgccagtacagcctgtcggactctccgaacggacgcagctatcggatctctgtgaagcgagaagatggcggcttggggacgcccggctatgtctcgtccttgctgcacgacgagatcaatgtcggcgacgaacccaagctcgcggctccctatggcaatttctacatcgatgtaagcgcgactacgccaatcgttctgatcagcggcggggtcgggctgacgccgatggtcagcatgctgaagaaggcgctccagacgccgccgcggaaggtcgtgttcgtacatggcgcgcgaaacagcgcggtacatgcgatgcgcgatcggctgaaggaagcctcccgtacctatccggatttcaagctattcatcttctacgacgagcccctgccgacggatatcgaggggcgtgactacgactttgcgggcctcgtcgacgtcgaaaatgtcaaggacagcatcctgctcgacgacgccgactattacatctgcggaccggttccgttcatgcgcatgcagcacgacaagctcctcggtcttggaattaccgaagcgcgcatccactacgaagtattcggtcccgatctgtttgccgagtga

SEQ ID NO: 99 - DNA, 1017 bp, Acinetobacter radioresistens
atgtcaaaccacaatgtagcacttcaatttgaagatggcgttacccgattcatcagtgttgctcagggtgaaactctgtcagatgcagcttatcgccaaaaaatcaatattcctctggattgccgtgatggcgcctgtggtacatgtcgtgcgttctgtgaatctggtagctatgacatgccagaagaaaactatattgaagatgcacttacaccggaagaagctgaagaaggttatattctggcctgtcagtgccgccctacttcagatgccgtattccagatccaggcatcttcagatgtatgtaaaactgaaatccataaatttcagggtactctatcacgggttgaaaacctgtctgactcgacaattacatttgatattgaacttgatgaaggccagccggatattcattttctggctgggcagtatgttaatgttgagattccgggaactacggaaacccgttcctattcttttagctcaaaaccgggcaatcgcctgactggttttgtcgtgcgtaatgtacccaatggcaaaatgagtgagtttctaagcaaaactgtaaaaccgggcgacaagatgagttttaccggtccatttggcagtttttacctgcgtcatattaaccgcccggtcctcatgttggcaggtggtacaggtatagcaccgttcatgtcaatgctacaggtactgcaagaaaagggctgtgaacagcctgtacgtctagtttttggtgtaaccaacgactttgatctggtggctcttgaaaaacttgatgagcttcaggaaaaatttccgtggtttgaatactgcacagttgtagctaatccggaaagcctgcatgaacgtaagggatatgtgtccaatcatattgatcatgactggttaaatagcggtgatgtagatatttatctttgcggaccggtgccaatggtcgaggcagtacgcggctggctggacgctgaaggtgttaaacctgcaaacttcctgtttgaaaaattctctgcaaattaa

SEQ ID NO: 100 - DNA, 975 bp, Sphingobium chlorophenolicum
atgacaaaccccgtttcgacaatcgacatgacggtcacgcagatcacccgcgtggccaaggacatcaactcttacgaacttcgcccggaacccggcgtgatattgccggagttcaccgcgggggcgcatatcggcgtttcgcttcccaacgggatccagcgcagctattcgctcgtcaacccgcagggcgagagggaccgttacgtgatcacggtcaacctcgaccgcaacagccggggcggttcgcgctacctccacgagcagttgcgggtcgggcagcgcctgtccatcgtaccgcccgccaataatttcgccctggtggagacagccccccactccgtcctgttcgcgggcggcatcggcatcacgccgatctggtcgatgatccaacggttgcgggaactcggttccacctgggagcttcattacgcctgtcgcggcaaggatttcgtcgcctaccgccaggaactggagcaggcggcggcggaggctggagcgagattccacctccacctcgatgaagaggccgacggcaaattcctggacctggcgggccccgtggcgcaggcgggccaggacagcatcttctattgctgcggccctgaggcgatgctccaggcctataaggcggcgacggcggacctgccgtccgaacgggtgcggttcgaacatttcggcgcggccttgaccggcgaaccggcggacgacgtgttcacggtcgtgctggcgcggcggtccggccaggaattcacggtcgaaccggggatgacgatcctggagacgctgctccagaacggcataagccggaattactcctgcacccagggcgtctgcggcacctgcgagaccaaggtgctggagggcgaacccgatcatcgcgactgggtcttgtccgacgagaagaaggcgtcaaattcgaccatgttgatctgctgttcgctgagcaaatccccgcggctggtgctggacatctga

SEQ ID NO: 101 - DNA, 1284 bp, Schizosaccharomyces pombe
atgtccagtgttgaggttaatcgtgaaaacgctgatgttgctaatacaaatcgacaggcaaatctagcagaaggctatgaaataaaagaacttaatgaatcgcaaaagcagtatatacgttcttcaatcccaatccttgaatcatctggggtaaacttgacaaaagcattctaccaaaaaatgctaggtaactacccggaagtgctcccgtactttaataaagcgcatcaaatttctttatctcaaccaaggattttagcgtttgctttgttgaattatgctaaaaacattgatgatctcacttcgctctcggcttttatggatcaaattgtggtcaaacatgttggtttacagatcaaagcagaacattatcccatagtgggacattgtctgttgagcaccatgcaagaactactacctagtgatgttgctaccccggcatttttagaggcatggactactgcatatggtaacttggcaaaaattttgattgactctgaaaaaaaagtttatcagagtcagccatggaacgggttcgtggaattcaaagttacagaacttattaatgaatcttccgacgtaaaatcagtttacttgggtccgaaagatccagctttcagaatttctcatgcccacccagggcaatatgtcagtgtgctctgggaaatacctggtttatcacataaaacattaagagagtattcattgtctaatcgtgttgatacttgtagaaatcagtttcgcatttctgtacgccgagtcgctgggggagtagtttccaactttgtacacgataacttgaaagttggtgatatcgttggtgtcagtcctccggccggtaattttgtttacaaacgttcagaggaaaatgtaaatcgcccgcttctttgctttgctggtggtattggtataacaccgcttattccaatcattgagacagctttattagatggaagaaaggtaaacttttgttattctagcagaaattatgttagccgtcctttcaaacagtggcttgagcaactcaaacttaaatataaagagaacttgaaattgaaagagttcttttcggaggagtcctcagttactaaagagcagattgtggatgaggtaatgactcgtattataaatgaagaagacctagaaaagctagacttaagtgaatgcgacatatacatgcttggaccaaataactatatgcgttttgttaagcaagaactagtcaaactaggagttgaaccaaataaagtacagagtgaattttttggaccgtatattccttaa

SEQ ID NO: 102 - DNA, 1167 bp, Pichia norvegensis
atgtcagcagcaaagcaattattcaagattgtcccacttacaccaaccgagattaactttttacaatctttagcaccagttgttaaagaacatggtgttacagttacatcaactatgtacaagtatatgtttcaaacgtaccccgaagtgagaagttactttaacatgactaatcagaagactggtagacaaccaaaagttcttgcattttcactttatcagtatattcttcatcttaatgatttaacaccaatttctggatttgttaatcaaattgttctcaaacattgtggtttaggaattaaacctgatcaatatccagttgttggtgaatcacttgttcaagcatttaagatggttctcggtgaagcagctgatgaacattttgttgaagttttcaagaaagcgtatggtaatcttgcacaaacattgattgatgctgaagcatcagtttataagacacttgcatgggaagaatttaaagatttccgtgtaactaaattagttaaagaagctgaagatgttacatcagtttatttaacaccagttgatggatttaaattaaagccaattattccaggtgaatatatttcatttagatgggatattcataatcctgatattacagatattcaaccaagagaatattcaatttcacaagatgttaaagagaatgaatatagaatttctgttcgtgatattggtattgtttccgattatatcaataagaaattacaagttggagatattgtaccagttcatgcaccagttggtactatgaaatatgattcgatttcaaagaagggtaaagttgcagttttagctggaggtattggaattacgccaatgattccaattattgaacatgcattgaaggatggtaaagatgttgaactttattattcaaatagaagttatcaaagtgaaccattccgtgaatttttctctaatttagagaaggaaaacaatggtaaatttaaattaaacaattatatcagtgcagagaatcaaaaattacaagttaaagatttagaacatattaatcctgatgaatacgatgtttatttacttggtcctgttgcatacatgcatgaattcaagacataccttgtcggtaagggagtttctgatttgaagatggaattctttggaccaacagatccttga

SEQ ID NO: 103 - DNA, 1200 bp, Saccharomyces cerevisiae; identical to SEQ ID NO: 4

SEQ ID NO: 104 - DNA, 1242 bp, Aspergillus fumigatus
atgcctctaacaccagaacaagttcaaatcatcaaggccactgtgcctgtgctggcagagcatggcacaaccatcaccactgtgttctacaagaacatgctcactgcccatcccgagctcaacaatgtcttcaataccacgcaccaggttaccggccaccaagctcgtgctctcgccggggcgctcttcgcctatgcctccaacatcgacaacctgggtgctcttggacccgccgtcgagctcatgtgccacaaacacgcctcgctgtacatcaagccggacgactacaagattgtcggcaaattcctgctcgaagcaatgggccaggtcctcggggacgccctcaccccggagattctcgacgcctgggccaccgcctactggcaactggccgacatcatgatcgggcgcgaggcccagctttacgagcaagccgagggctggaccgacttccgtgactttgtcgtcgcgctgaaggtccctgaatcttcggaaatcacctccttctatctgaagccggcggacggcaagcctctgccggccttccagccgggacagtacatctccgtgcaggtccacgtccccgagctcaactacctgcaggcgcgccagtactctctcagcgacatgccccggtcagactactaccgcatcagcgtgaagaaggaatcgggactgaaccccgccgagcccggggccaaggcgcaccccggccacgtgtcgaacatcctgcacgcgtcggtcaacgagggcgataccatcaaggtctctcatccgttcggcgactttttcctgtctgacgcgaaagccgcgcaccccgtggtgctcctctcggccggtgtcggtctgacccccatgacgtcgattctcaacacgctgacctcgcaggctccggagcgcaaggtcagcttcatccacggcgcccgaaacgctcgggcgcgtgcgttcaagaaccacatcacctctctggaacagaagctgccaaacctcaagtccacctttttcaccagccatcccacggaggaggacaaggagggcgatgattaccagttccgcggccgtgtggatctgagccagttggacagcaaccgggatctgttcctggatgatgccacaacggagtactacgtgtgcggacccgacacgttcatgacggacatgctgaatgttctcaagtccaagggcgtgagcgaggaccgcgtgaagctggagctgttcggaactggcggtgttcctcattga

SEQ ID NO: 105 - DNA, 1257 bp, Neurospora crassa
atgaccctcaccgacgcccaaatatccatcgtcaaatccaccgcccctgtcctcaagcaacacggcgaagccatcaccaccgtcttctacaacgacctcatcacggagaacccctccctcaaaaacatcttcagccttacctcgcaagccaccggcgcccaaccgcgcgccctcgcccacgccgtcctcgcctatgccacctacatcgacaacctttccgcgctctcggaggcggtcgcgcgcattgcgcacaagcacgtgtctctccaagtcgagccggcgcagtacgctattgtcggccaatacctgatccaagccatcggcaaggttctgggcgatgcggcgactcccgagattgtagacgcttggacggcggcatatggagttttggcgaacgtttttattggcgtcgagggaggcatgtacgaggagaatgaaaagaaagaccactggaaggggtggaggaagttcaggattgcgaggaaggtggaggagagcagttccatttcgagcttttacctgaggcccgtggatggggccactctgcccaagtatctgcctggccagtatgtgtctgtgcaggtgctggtctcgcagttggggtatttgcagagtaggcagtacagcttgagcgaggcgccgaaggagggcgggatggaggaatatcgtattagtgtcaagagggaggaaggggaaaccggtgcgccgggactggtttccaacttgctccatggtatgcaagagggcgcggaggtggaggttagtcatccccagggcgagttcttccttgaccccgcggatgcaagcaaggagggggtgccggctgtgttgatctcggtgggcgtgggcgctactccgatgatggctatcctcaagagcttgcttcaggagaatgtcaagaggagaccggtgtcgtggatccatgcgagcaagtcgagctcgacgcagccgtttggcgaggaggtgaggcgcatcgtcaaggagaaccctgagcaggtgtcggcacatgtgtttctgaagacggtggctggtacggatcaggccggtgtgcattacgattttgcggatacgaggatggacttgaccaagttggatggggagcgggatctgcatttggcggataagaggaccgagtactacatctgcggaccggagacgtttatggtggaaaccaggaaagtgttggttggtcttggagtagataagagcaaggtgcacttggagctttttgctacgggtttcgttgctgatgagtag

SEQ ID NO: 106 - DNA, 1614 bp, Neurospora crassa
atggctctcacttaccaacaaagtaagctcgtcagagatactatacccgctctcaaggagcacggtgagaggataacgagcatcttctacaagactatgctcaccgaccaccccgaactcaacaactacttcaactcggtaaaccagaagaatggcaggcaacctcgggccctgacggccgtcatcttgggcttcgcctcaaacattaaccatcttagcgagctcgtccccaagtttgagcgcatgtgcaacaagcactgctcgttgggtatccagccagaacactacgaggttgtcggcaagtatctcatccaggctttcggcgaggttttgggccccgcgatgacgcccgaggtgcagacggcatggacaaaggcatattggatgctagccaagatgttgattgggcgcgaggcacagttgtacagggactttgagagctggccctcatggcgccctttcaagatcgacaggattgtcaacgagtgcgatgacctctacaccttctatcttgttcctcaggatggaaagaggttaccgaaattcctacccggccagtacgtctccgtccagatccaggtccctggtggcaacctccagtccagacagtattccctcagtgaggcgtggagggaggattactaccgtatcaccatccgccgagacgagggcaccgtctactccaactcagtttccaagtccttcttcaaccccggcatcgtctccaactaccttatcgatcaaactaccgtcggttctatccttcaggtctctcacccggctggcgagtttttcttggacgtccacaacacgagcacggtgcctctggttctgatttctgctggtgtcggcgtcactcccatggtttccatcgccaacaccgttatggagagtcaacccagtcgccaaattgcctggatccatggctgccgcaagcatatcccctttgaggaccacatcaagactttgcgcaagaagaatagcaacttccaaaccaagatcttcaagaccgtcatcaacagcactgatcgtcctggcgagacatatgactacaacgagcgcatggacctggccaagctcaagcccgaggagctccatcttcagcatggcggcactgagtacttcatctgcggcccggagcagttcatggtcaaccaaaaactctacctcatgcagcaaggtgtctcggcctcgcgcatcaaatgcgagatcttcaccacgggcgatttgaagctgggtctcataatagagaccatcgatcaggaggaggaggctggggacgaaaagagggtgacacatataagcagagaaggagggggtggatgggaaaatgtggcgcctgatccccgcaaggcgagaaggtctccatcgctttccacaaagctgcccaaacggagaaaccacgccgccgtgtccgggctcagcacaggcagcggcactcagaaacttgccccgactctgctcaacccctcgtcaacaaggacccgacgagacatgacaatacctccaccaacaacaactacggcgatgcccggtatggaggaggaggaggaggaggagagaagagaagaagagcgtcgatatcggtggcgggaagcatcagcactgggataa

SEQ ID NO: 107 - DNA, 1032 bp, Methylocystis sp. M
atgtatcagatcgtcattgagacagaggatggagaaacctgttcattcgaatgcggaccgagcgaggacgtcatctctgcgggccttcgtcagagcgtgattcttctcgcgtcctgccgcgccggcgcgtgcgcgacctgcaaggccgattgcaccgatggcgactatgagctcatcgacgtcaaggtccaggcgctgccgccggacgaggaggaggacgggaaggttctgctgtgccgcacctttccacgcagcgatctccacgtcgtcgtgccctacacctatgatcgcatctcgttccaggcgatccagaccaattggctcgccgagatcaccgagtgcgacagggtgtcgtcgaatgtcgttcggcttgtcctgcagcctttgacggctgacggcgcggccccgatttcgctgaacttcctgccggggcaattcgtcgacatcgaaattccgggcacacacacgcgccgctcttactcgatggcctcggtcgctgaggacggccgcctggagtttttcattcgcctgctgcccgatggcgccttctccaattatctgcgcacgcaggcgcgcgtcggccaacgcgtcgcgctgcgagggccggcgggctccttctcgctgcacaagagcgagcggccgcgcttcttcgtcgccggcggaaccggattgtcgccggtcctgtcgatgatccggcaactgcacaaggagagtgatccgcagcccgcgaccttgttcttcggcgtcaccaattatgaggagctcttctatgtcgacgagctgaaggcgctgcagcatgccatgccgagcctcgatgtgcagattgcggtcgtgaatgtttcggagggcaatggcgtcgccaagggcacggtaatcgatttgctgcaggacgaactcggcaggcgcgcggagaagcccgacatctatctctgcgggccgccgggaatgatcgatgcggcatttgcggccgcctcttcggccggcgttcccaaggagcaagtgtatctcgagaaattcctggcgagcggctga

SEQ ID NO: 108 - DNA, 1026 bp, Pseudomonas resinovorans
atgagccacaaggtcgccttcagttttgccgacggcaaaaccctgttcttcccggtacagagccacgaaatcctgctcgacgcggcgttgcgcaacggcatcaacatccccctggactgccgcgagggcgtgtgcggcacctgccaggggcgctgcgaatcgggccagtacagccaggactatgtcgacgacgaagcgctgtcggccgaagacctgcgccaacgcaagatgctcacctgccagacccgggtcagctccgacgccgcgttctacttcgacttcgcctccagcctgtgcaatgccccagggccaggccggctcaagggcatcgtgcgcgcggtggagcaggtttcgcccaacaccgcgatcctgcacctggacgccggcgccgatggccagcaactggatttcctgcccggccaatacgcccgcctgcaaatacccggcacccacggccagcgctcgtactccttcgccaaccgccccaacagcggcaaccagttgcagttcttgatccgtttgctgcccgacgggctgatgagcaactacatccgcgaacgcagcctgatcggcgacgaaatcctgctggaagcgcccctgggggccttctacctgcgccacgtcgacaagccgctggtgttcgtcgccggcggcaccggcctgtcggcctttttgggcatgctcgacgaaatcgccgagcgcggcggctgcggccacccggtgcacctgtactacggcgtgcgcaacgccgcggacctgtgcgaaacccagcgcatcgcggcctacgccgaacgcatcccgggctttcgcttcaccccggtcatcagcgaccccagcccggactggcacggcaagcgcggctacatcaccgagcacttcgacctggccgagttccgcgaccaggccctggacatgtacctgtgcgggccgccgccgatggtcgagtcgatcaagcaatggctcgacacccaggccctggaccagacccgcctgtactacgagaaattcacccagagcaacacctga

SEQ ID NO: 109 - DNA, 1029 bp, Pseudomonas resinovorans
atgagccacaaggtcgccttcagttttgccgacggcaaaaccctgttcttcccggtacagagccacgaaatcctgctcgacgcggcgttgcgcaacggcatcaacatccccctggactgccgcgagggcgtgtgcggcacctgccaggggcgctgcgaatcgggccagtacagccaggactatgtcgacgacgaagcgctgtcggccgaagacctgcgccaacgcaagatgctcacctgccagacccgggtcagctccgacgccgcgttctacttcgacttcgcctccagcctgtgcaatgccccagggccaggccggctcaagggcatcgtgcgcgcggtggagcaggtttcgcccaacaccgcgatcctgcacctggacgccggcgccgatggccagcaactggatttcctgcccggccaatacgcccgcctgcaaatacccggcacccacggccagcgctcgtactccttcgccaaccgccccaacagcggcaaccagttgcagttcttgatccgtttgctgcccgacgggctgatgagcaactacatccgcgaacgcagcctgatcggcgacgaaatcctgctggaagcgcccctgggggccttctacctgcgccacgtcgacaagccgctggtgttcgtcgccggcggcaaacccctgtcggcctttttgggcatgctcgacgaaatcgccgagcgcggcggctgcggccacccggtgcacctgtactacggcgtgcgcaacgccgcggacctgtgcgaaacccagcgcatcgcggcctacgccgaacgcatcccgggctttcgcttacaccccggctcatcagcgaccccagcccggacatggcacggcaagcgcggctacatcaccgagcacttcgacctggccgagttccgcgaccaggccctggacatgtacctgtgcgggccgccgccgatggtcgagtcgatcaagcaatggctcgacacccaggccctggaccagacccgcctgtactacgagaaattcacccagagcaacacctga

SEQ ID NO: 110 - DNA, 1248 bp, Fusarium oxysporum
atggctctcaccgcagcacaagtagcaattgtgaagtcaactgctcccatcctgaaggagcatggcaagactatcaccaccactttctaccgcaacatgctcggtgctcatcctgagctcaagaactacttctctctacgaaaccagcagaccggagctcaacaagctgctctcgccaactctgtcctcgcctacgccacatatatcgacgaccttggcaagctttcccacgccgttgagcgcattgctcacaagcacgtttctctcttcatcaagccagagcactaccccatcgttggcacacatctcatcggtgccattggcgaggttctcggttctgctttgacgactgagatcaaggacgcttgggttgctgcttatggccagctcgctgatatcttcatccagcgcgagggtcagatgtacgaggctgctggcgaatggaactcgtggcgcaagttcaagattgtcaagaaggaggctgagaacgactctgttactagcttctaccttgagcctactgatggcaagcctctgcccaagttcctccccggacaatacgtcagcgtacagattcccatccctgagcttgatggtcttcttcagagccgtcagttcagtctgagcgaggcccctggcaccaatcactaccgcatcagtgtcaagcttcagggtcctactgaggagcctgctgttgaggatctcgctgctggtaagattgctggtcttctctccaccagacttcacaaccgttacaacgtcggtgacgaggttgagctgagccctcctgctggagagttctcacttgaccctgccgacacttccgctgccaagaagcctcttgttctcctctccgctggtgttggcgccactcctctcgtctccatcctcgactcagttctccagtccccgaccgcctcacgacccatcacctggatccatggtgctcgctactcgggctctacctgcttcgtcccccatgttctcgactctgctaagaagcacgagaacatcactgccaagatcttcctcgaggatgttaaggagggtgaccagtacgacttcaagggcgagatcgaccttgccaagctccagaaggaacagcttctccagctcgacaacgctgatgctgagtactacatctgcggacctgaggactggatggtcaatgtcagggcattcctcgaggagaacggtgttccccgcgagcgccagcacctcgaactcttcaagactggtgatatttaa

SEQ ID NO: 111 - DNA, 1188 bp, Erwinia chrysanthemi
atgctggatcaacaaaccatcgccaccatcaaatccaccattcctctgctggccgaaaccggtccggcgttgaccgctcacttttatcagcggatgttccaccataacccggaactgaaagatatcttcaatatgagtaatcagcgtaatggcgaccagcgcgaagcgctgttcaatgccatttgcgcctacgcgacgcatatcgaaaacctgccggcgttgctgcccgcggtagaacgtatcgcgcaaaagcatgccagcttcaatattcagccggaacagtatcagatagtgggtactcacctgctggcaacgctggaagaaatgttccagcccggtcaggcggtgctggatgcctggggcaaacgctacggcgtgctggcgaatgtgtttatccagcgggaaagcgacatttatcagcaaagcgccggacaaaacggcggctggcatggcatccggccgtttcgcattgtggcgaaacagccccagagcagcctgatcaccagcttcacgctggaaccggtggatggcggcccgatcgccgcattccgtcccggccagtatctggcggtctacatccgcgataagcgctttgaatatcaggagattcgtcagtactcactaacgaacgaacccaacgggcgctattaccgtatcgcggtcaaacgggaaacgatgggcagcgtatcgggctatttgcacgatgtcgcccgcgaaggcgatgtgattgaactggccgccccgcacggcgatttctaccttgaggtcacgccagagacgccggtagcgctgatttccgccggtgttggtcaaacaccgatgctcagcatgctgcacagcctgaaaaatcagcagcatcaggcggatatcttctggttacacgcggctgaaaacacagaagtacatgccttcgccgacgaaatcgccgatgttgccgctacgctgccgcagttgcaatcctatgtctggtatcgggaagcctcatcggaagcggcacgttcggcgcatgcttttcacggattgatggcgttgaaggacctcccgacgccgctgccgatgacaaacctgcactgttatttatgcggcccggtcgcctttatgcaattcgccgcccgacaattgttggagttggggattaccgaatcgcagattcattacgaatgctttggtccgcacaaggttatataa

SEQ ID NO: 112 - DNA, 1191 bp, Salmonella typhimurium
atgcttgacgcacaaaccatcgctacagtaaaggccaccattcccctgctggttgaaacaggaccgaaactgaccgcccacttctacgaccgtatgtttacgcataacccggagctcaaagaaatcttcaatatgagcaaccagcgtaacggcgatcagcgtgaagccctgtttaatgctatcgcggcctacgccagcaatatcgaaaatttaccggcgttgctgccggcggtagaaaaaatcgcgcagaagcacaccagcttccagattaagccggagcagtacaacatcgtcgggacacatctgctggcgacgctggacgaaatgttcaacccgggccaggaagtgctggacgcgtggggcaaagcctatggcgtactggctaacgtctttattcatcgggaagccgagatttatcacgagaacgccagcaaagacggcggctgggaaggcacgcgccccttccgcatcgttgcgaaaaccccgcgtagcgcactgatcaccagctttgaatttgaaccagtcgacggcggtacggtggcggaataccgtcccgggcagtatctgggcgtctggctgaagccggaaggttttgcgcatcaggtgttccgccaatattcactgacccgtaaacccgatggcaaagggtaccgtattgccgtgaagcgtgaagacggcggccaggtatcaaactggttacaccatcacgccagcgtaggcgatgtggtgcatctggctgcgccggcaggtgacttctttatgaatgtcgccgctgatacccccgtttcgctgatttccgctggcgtcggccagacgccgatgttagcgatgctcgatacgctggcgaaagaacagcataccgcgcaggtgaactggttccacgcggcggagaacggcgacgtccatgcgtttgccgacgaagtgagcgagctgggccgtacactgccgcgtttcactgcccatacctggtaccgcgagccgactgaggccgatcgcgcccaacgcctcttcgacagcgaagggctgatggatttaagcaaactggaagccgcgatcagcgatccagcaatgcagttctatctttgcggcccggtaggctttatgcagtttgccgcaaaacaactggtttcacttggcgtgaataacgaaaacattcattacgaatgcttcggcccgcataaagtgctgtaa

SEQ ID NO: 113 - DNA, 441 bp, Vitreoscilla stercoraria
atgttagaccaacaaaccgtagacaccagcaaagccactgttcctgtattgaaagagcatggcgtgaccattaccacgacgttttaccaaaatttgtttgccaaacatcctgaagtacgacctttgtttgacatgggtcgccaagcatctttggaacagcctaaggctttggcgatgacggttggggcggcggcacaaaacattgaaaatttacctgcaattttgcctgcagtacaaaaaattgccgtcaaacattgtcaagcaggcgtggcggcacgacattatccgattgtgggtcaagaattgttgggtgcgattaaagaattattgggtgatgcggcgaccgatgatattttggatgcgtggggcaaggcttatggcgtgattgccgatgtttttattcaagtggaagcggatttgtacgctcaagacgctgaataa

SEQ ID NO: 114 - DNA, 765 bp, Acinetobacter sp.
atgacaccacaacaaattgaactcgtaaaatctaccgtacctgtactacgcgaacatggcgtaacactcaccagctatttttataatcgcatgctcaacaatcaccctgaattaaaaaatgtgtttaatttagatcatcaaagcacagggcgacaacctcgtgcgctggccgccgcagtactggcttatgctgaacatatcgaacaacctgaaaaattagccaaagcagttgaacggattaccaccaagcatgtcagcctaaatatccagccagaacaatatgcaattgtgggtgaaaatcttctacattcgattagtgaagtattgaacgtaccgttcgaatcagaattgattgaagcgtggaaacaggcttatttacaactggcagatattttaattgaggtagaaaaagagaaatatcatcaacttgccaaacaggatggcggctggactggctggcgtagcttcaagatcattgcaattcaagaacaatatgaaggcaaatgttttaagatttcagcaacagaccaacaggctatactcgctgcaacgttaggagaatatatctctgtgaaagtgcatgtgccagaaaaagaactcgatcagcctcaacaatttaacctgaatactacgcaagctgatgatcattatgagtttgtggttaaaccagaacctgcacatagtgactatgatgtcgcaaatattttactaaatcattatagtctaggtgatgaggtgatggtttctgcacccattagaaactaa

SEQ ID NO: 115 - DNA, 1062 bp, Acinetobacter sp.
atgcaagcaattcaaaagagaacaacacgcttacgttcattgaccaagtcagtgttcgaaccgcatgcaactgatttctggttacaaaaaattaatcctatttggtcgactcatttagctcttgctaaaattgtagacaaaaaacaagttgcaaatgacactgtatctttaacactgcaacccaatcgccatgtcaatttaggtcgagctggtcagcatcatcctgttaaagttaaaattgctggtcgtatttatgagcgtagttacagcttgacagaacgtcatggtcaactcattttaactgttaaaaaagtcgctgaaggtaaggtgagtgcttggttggtcgatcacagccaaattggcgatattattgaacttggacaaccttttggggaaatgcaattacaagatcagcaacgtttggttttgcttgcagcaggtagtggtatcacgccaatgctcagtttggttgaagcacttaagcatcaacaggctttaaatacaacgcaagttcagcttttatactgggtgaagcatcatgaagatgcagcctatgcccaatggttcgaagctctggcaaagcaatttcctttattccagtttcaaattttttatactcaagatcaggagcatgatggacgtcttaacgtgacccatcttgccgctattgatgatctggatcaaagcacagtatatgcctgtgggccttctggttttgtggcaaaagctgaagaactttttgctcaggcacaagtattcatgagcgaagcctttagtttaagtaccgtaagtgaagacgagactggttttgttaatgtcaccttgagtaaatctaataaaacggtggcaattcctaaaggtcaatctatattggcaggtttagagcaagccaatgtaaaactaacgtacggttgtcgtatggggatctgtaataaatgtgcgtgtcagaaagcacaaggttctaccaggaatctgctgaatgcaagtgaaaactcagaacccaacaatcttttaaaaatctgtgtgaactcggctaaatctgatcttgttattgatctttaa

SEQ ID NO: 116 - DNA, 1047 bp, Acinetobacter sp.
atgagtttatatttgaataggattcctgccatgtcaaaccatcaagtagcacttcaatttgaagatggcgttacccgttttattcgcatcgctcaaggtgaaaccttatccgatgccgcataccgtcagcaaatcaatattccaatggactgccgtgaaggcgcgtgtggtacctgccgtgctttttgtgaatcgggcaactatgacatgcctgaagacaattacattgaagatgcactcaccccagaagaagcgcagcagggctacgttttggcatgtcaatgccgtccaacttcagatgctgtatttcaaattcaggcgtcttctgaggtatgtaaaaccaagattcatcactttgaaggcacgttggcgcgggttgaaaatctatcggattcgaccatcacctttgatattcagctcgatgacggtcagcccgatattcattttctggcagggcagtatgtcaacgtgacgctgccgggcaccacggaaacacgctcgtattcgtttagctcacaaccaggcaatcgcttaaccgggttcgtggttcgtaatgtgccgcaaggtaaaatgagcgaatatttaagtgtgcaggccaaagcaggcgacaaaatgagctttactggaccatttggtagtttttatctgcgtgatgtcaagcgtcctgtgctcatgctggctggcggtacgggaatcgcaccgtttttatcgatgttgcaagtacttgagcaaaaaggcagtgagcatccagtacgactggtgtttggcgtaacccaagattgtgatctggtggcgcttgaacaactcgatgcacttcagcagaaactaccatggtttgaatatcgtaccgtggtggcacatgcagaaagtcaacatgaacgtaaaggttacgtgacgggtcatatcgaatatgactggctaaatggcggtgaagttgatgtgtatctgtgcggaccggttcctatggtggaagcggtgcggagctggctggatacgcaaggtattcaaccggcgaactttttatttgaaaaattctctgccaactaa

SEQ ID NO: 117 - DNA, 1017 bp, Acinetobacter sp. ADP1
atgtcaaaccatcaagtagcacttcaatttgaagatggcgttacccgttttatctgcatcgctcaaggtgaaaccttatccgatgcagcataccgtcagcaaatcaatattccaatggactgccgtgaaggcgagtgtggtacctgccgtgctttttgtgaatcgggcaactatgacatgcctgaagacaattacattgaagatgcactcaccccagaagaagcgcagcagggctacgttttggcatgtcaatgccgtccaacttcagatgctgtatttcaaattcaggcgtcttctgaggtatgtaaaaccaagattcatcactttgaaggcacgttggcgcgggttgaaaatctatcggattcgaccatcacctttgatattcagctcgatgacggtcagcccgatattcattttctggcagggcagtatgtcaacgtgacgctgccgggcaccacggaaacacgctcgtattcgtttagctcacaaccaggcaatcgcttaaccgggttcgtggttcgtaatgtgccgcaaggtaaaatgagcgaatatttaagtgtgcaggccaaagcaggcgacaaaatgagctttactggaccatttggtagtttttatctgcgtgatgtcaagcgtcctgtgctcatgctggctggcggtacgggaatcgcaccgtttttatcgatgttgcaagtacttgagcaaaaaggcagtgagcatccagtacgactggtgtttggcgtaacccaagattgtgatctggtggcgcttgaacaactcgatgcacttcagcagaaactaccatggtttgaatatcgtaccgtggtggcacatgcagaaagtcaacatgaacgtaaaggttacgtgacgggtcatatcgaatatgactggctaaatggcggtgaagttgatgtgtatctgtgcggaccggttcctatggtggaagcggtgcggagctggctggatacgcaaggtattcaaccggcgaactttttatttgaaaaattctctgccaactaa

SEQ ID NO: 118 - DNA, 1320 bp, Nostoc punctiforme
atgctagaaagtctgggaagaattaagaatccattagtcagaagtatagccgcagcagctacagttagttcagtaattaccttatctgctgctgttgtaattggagtaagcaatgccaaagctaaatctgcctatcaatttggtgtctattcctcgctgtttggaacagctagtggtgcagtatttggcttagtttatacaaacaaagcaagtggaaacaaatctactccagacctcaaaacattagatagtcatgtttggcaagattggcgaaattttgttgttgttcgtaaggtgaaagagagcgaagaaattacctctttctatttacaacctgaagataaaggggaaattaccaactttcaaccaggtcaatttttaaccatcaaacttgatatacctggacaggataagcctgtaattcgtacttactcgctttcagattatcctgaaaactgtgaatactatcgcctctcaattaagcgggaacctgcaccgaacggattagatgttatgcctggtatagcatctaattttatgcacgatcgcattcaagaaggttcagtaattttagcaaaaccaccaaacggtaaatttgttttagatgtgcagaaatctatccccgcagtgttgattagcaatggggtggggattacgccaatgattagtatggcgaaagcttgtagtcttcttaatcctactcgtcctatttggtttgtacatggtgctagagacggtaaattccatgcttttcgggatgaagtgagggaaatttctcgacaaaatcataatctgaatgtgcattttcgctatagtcgtcctacacctgaagatagaggtaaataccacagtgttggttatgttgatgctgctctgattcaagagttagtacgacaagaagctgagtattttctgtgtggttctccatcttttatgcagtccataatgcaaggattaaaagaatcgggagtacctgacagtagagtattctttgaatctttcggtaaaccgatgaaaagtgtgtctgagaaacaaactcaaacggtaactggagatgataaatttgcagaaattgtctttgccaaatctggcaaaactttgacatggcaacctagtgatggcactatcctagaatttgccgaagccaatgatattaatccaccttttagttgtcgtgtaggtgtttgcggtacttgtatgtgtaaaatccgcgaaggtgtagttgcttaccaagaagaaccaactgcaacaactgatcagggttcggtgttgatttgtatttctcaacctggaacgtcaaaattggtgttggatatttaa

SEQ ID NO: 119 - DNA, 381 bp, Nostoc punctiforme
atgtatgaaatcatgtttcaaaatcatccagaagtcaaagaacaatttagtatggcggctcaagcagatggttctcagcctgcaagattagcaacagcagtttatagttatgctaaccaaattgataatttgcctgctttaaagtcgatggtagagaagattgcccatcgtcatgtgcagactcatgttacaccagagcaatatcctattgtcggagaaagtttactgcaagccatgaaagatgttttgggagaagctgctacagaagaagtgatggcagcttggactgaagcttatcaggcattatctgaagtgtttattcacagagaacatgatatatatgtgggtgaagataaaaaagcacagcttttgcattcttaa

SEQ ID NO: 120 - DNA, 348 bp, Vibrio cholerae
atgcaggctatcctgcacaccttagccaagcaaaataagtctggagtgacttatctttatgcgtgtaattctgctaaggaacatatttttgctcaggaagccgcgcagctcattgcgcaacagggatggatgcagcaagtgtggtaccgtgatgaaagtgcagatgatgtcttacaaggtgaaatgcagttagcagagcttattctgccgattgaggatggagatttctatttgtgtggtccgatcggttttatgcagtatgtggtcaagcagttattggcgcttggtgaggataaggcgcgaattcattatgaagtgtttggtccacatgcacagcttgcggcgtaa

SEQ ID NO: 121 - DNA, 1236 bp, Bacillus clausii
atgagtactgtgatgttaaaagaagaatcgaaacgattggtgaaagcaactgttcctattttagccgcacacggagaaacgatcacaaagcatttttacaagcgaatgtttcaccatcatcctgaactgttaaacgtatttaaccgaaccaatcaaaaaataggcaggcaacctcaggcactggccaattcgatctatgctgccgcccagcatatcgacaatttagaagcgattttaccagttgtaaaacggattgcccataagcaccgcagcttaaatattaagccggaacaatatccgattgttggcgaaaacctccttgccgccatgaaagaagtattaggagaggcagcttccgatgatgtaattgaggcgtggagagaggcgtatgaaatcattgccggtgtgtttattgaagtagaaaagcaaatgtacgatcaggccggcaaagctcctggcgggtggagtggatttcgttcttttgtggtagagaaaaaaaagcaggagagcaaggcgattacatcgttttatttaaagccgaaagatggaaatgagatcgcttcttaccagccaggccaatacatgacggtaaaagtgaacatccctggtgatacgtatacgcatatgcgccaatacagcttgtcagacgctccgggaaaaggatattatcgaatttccgtaaagcgggaagagggcaacactgagtgccctccaggtgtcgtctccaattatttacatcaacatattcgtgaaggcgacgtactagaaatgaccgctcctgctggtgattttactttaaaacagggagaagaacgcccgatcgttttaatcagcggcggcgttggcatcacgccacttatgagcatgtttaatacccttatgcagcaaggaaccaaacaaaaggtgacgtttatccatgctgccattgatggaacctaccatgcgatgcatgaccatgtagcccagacagcgagtcagaaagaaaatgtccactacgctgtctgctatgaacgccctacgtcagaagaccagatgaatccttatatgaagaaggaagggtatattgatgagcaattcctccgttccatgattgaagatcatcacgctgatttttatttttgtgggcctattccttttatgaagacggtttaccacatcttgaacaactggggcgttccagaagaacaaatccattatgaatttttcggtcctgcggggacgcttgcttcttcttaa

SEQ ID NO: 122 - DNA, 1185 bp, Vibrio parahaemolyticus
atgctcagcaatcaaaccattgagatcgtgaaagcgaccgcgccactaatcgcagaaacaggaccaaaactgaccgctcacttctatgaccgcatgtttactcacaaccctgagttaaaagacattttcaacatgagcaaccagcgtaatggcgatcaacgtgaagcgctattcaatgccatctgtgcatacgctgctaacattgaaaacttgcctgctctgcttggcgcagtggagaaaattgcgcataaacacaccagctttttgatcacgaaagatcagtatcaaatcgtaggtaaacacttgatcgctacaattgatgagttattcaatccgggccaagaagttttaggcgcgtgggctgaagcttatggcgtattggctaatgtatttatccagcgcgaagagcaaatctatcaagcgaatgcatcgcaagaaggtggctggcgagggctacgtgagtttgagttggtcggtaaacaattggaaagtgaacacatttgcagttttgttttcaaaccgacggatggcagtaaagtgacgaaatacaagcctgggcagtacctcggcatctacatcaacagcgataagtttgaaaaccaagagatacgtcaatacagcctatcttcttcggttcaagagaacacttaccgcatctccgtaaaacgtgaacaaggcggtaaagtatccaactacctgcacgatgagctaaacatcggcgataaagtaaaactcgcagcgccagcgggtgatttctttatggatgtagataccaatacaccagtggtgctgatttctgcaggtgtcggccttacgccaacactgtcaatgctagaaagcttgacggaacatcacgcgccagtgacttgggtacatgcaacagaaaacagcaaacaccacgcctttaaagagcacgtaaaccagctagtcacggcgaaagaaaacatgaacgcgctcatttggtataaccaaccaacggcagaagacaagataggtgaagacttccactttaccggctttgtaaacctgcatgaaatcgaagccgcactcaaacaagacaacgtacaagtgtacttctgtggtccggtgggctttatgcagcacgtcgcgaaacagctacaagaacttggcgtccctcaggaacaattccattacgaatgctttggcccacataaggtggtttaa

SEQ ID NO: 123 - DNA, 744 bp, Sphingomonas sp.
atgacaagccccgcttcgacgatcgacatgctggtcacgcaaatcacgcgcgtggccaaggacatcaactcatacgaactgcgcccggaaccgggcgtgatattgccggagttcacggccggagcgcatatcggcgtttcgctaccgaacgggattctgcgcagctattcgctcgtcaatccgcaaggcgagagggaccgttacgtgatcacggtcaatctcgaccgcaacagccgtggcggttcgcgctatctccacgaacagttgcgggtgggccagcgcctgtccatcgtgccgccggccaataatttcaacctggtggaaacggcgcggcactccgtccttttcgcaggcggcatcggcataacgccgatctggtcgatgatccaaaggctgcgggaactcggctcatcctgggagttgcactacgcctgtcgcggcaaggagttcgtcgccttccgccaggaactggagcaagccgcttcggaggctggagcgaccttcaacctccacctcgatgaggaggccaatggcgggttcctggatctttccggaccggtggcgcgggcgggtgaggacagcatcttctactgctgcggcccggaagcgatgttgcaggcctataaggcggcgtcggcggacctcccgtccgagcgagtgcgcttcgaacatttcggcgcggccccatcgagcgcaccggccgatgacgtgttcacggtcctggcgcggtcgggccaggaattc

SEQ ID NO: 124 - DNA, 1092 bp, Mycobacterium tuberculosis
atggcggagcgcaccgtgccagagaccagctgggccagtaggcccgccgacctttacggtcgccgcagccgggaccgcttcttcacagcgctgtggggtgtacgagcgttattgggaggattgggcgcggcctcgcggtgggaaccgtcgcgggtgcagccggtgcggcgcacgaatcccgcggtggttaccaagcgcgagctggtcgctcccgacgtggtggcgttgacgttggctgaccccggtggcggattgctcccggcctggtcgcccggtgggcacatcgacgtgcagctgccctcggggcggcgccgacagtactcgttgtgcggtgtgcccggacggcgtacggactaccggatcgccattcgcagaatcgcggacggcggcggcggttcgatcgagatgcacgaggccttcgacgtaggtgacacgtgcgagttcgaaggtccccgcaacgccttccatctcggtctggccgagcgtgacgtgcttttcgtgatcggcggtatcggggtgacgcccatcctgccgatgatccgggccgccgaacagcgcggaatcgactggcgcgcaatctatgccggtcgcggtcgggagtacatgccgttcctggacgaggtagtggcggtggcacccggccgggtcacggtgtgggccgacgacgagcacggtcgttttgcgtctgtcgatgaactgttggccggcgcagggccgacgacggccgtttacgtgtgcgggccgcccgggatgttagaagcggtgcgcgtggcccgcaatcaacacgccgacgcgccgctgcattacgagcgattcagcccgccgccggttgtcgacggagttccgttcgagctggagctcgcacggtcgaggcgagtgctccgagttccggcgaaccggtcggcgctggacgtcatgctcgactgggacccgacgacggcatactcctgccagcagggcttctgcgggacctgcaaggtgagagtccttgccgggcaggtcgaccgccgcggccgcatcatcgaaggcgataacgagatgctggtctgtgtgtcgcgggccgtgagcggtcgggtggttatcgacgcctga

SEQ ID NO: 125 - DNA, 1191 bp, Escherichia coli
atgcttgacgctcaaaccatcgctacagtaaaagccaccatccctttactggtggaaacggggccaaagttaaccgcccatttctacgaccgtatgtttactcataacccagaactcaaagaaatttttaacatgagtaaccagcgtaatggcgatcaacgtgaagccctgtttaacgctattgccgcctacgccagtaatattgaaaacctgcctgcgctgctgccagcggtagaaaaaatcgcgcagaagcacaccagcttccagatcaaaccggaacagtacaacatcgtcggtgaacacctgttggcaacgctggacgaaatgttcagcccggggcaggaagtgctggacgcgtggggtaaagcctatggtgtactggctaatgtatttatcaatcgcgaggcggaaatctataacgaaaacgccagcaaagccggtggttgggaaggtactcgcgatttccgcattgtggctaaaacaccgcgcagcgcgcttatcaccagcttcgaactggagccggtcgacggtggcgcagtggcagaataccgtccggggcaatatctcggcgtctggctgaagccggaaggtttcccacatcaggaaattcgtcagtactctttgactcgcaaaccggatggcaaaggctatcgtattgcggtgaaacgcgaagagggtgggcaggtatccaactggttgcacaatcacgccaatgttggcgatgtcgtgaaactggtcgctccggcaggtgatttctttatggctgtcgcagatgacacaccagtgacgttaatctctgccggtgttggtcaaacgccaatgctggcaatgctcgacacgctggcaaaagcaggccacacagcacaagtgaactggttccatgcggcagaaaatggcgatgttcacgcctttgccgatgaagttaaggaactggggcagtcactgccgcgctttaccgcgcacacctggtatcgtcagccgagcgaagccgatcgcgctaaaggtcagtttgatagcgaaggtctgatggatttgagcaaactggaaggtgcgttcagcgatccgacaatgcagttctatctctgcggcccggttggcttcatgcagtttaccgcgaaacagttagtggatctgggcgtgaagcaggaaaacattcattacgaatgctttggcccgcataaggtgctgtaa

SEQ ID NO: 126 - DNA, 1191 bp, Escherichia coli
atgcttgacgctcaaaccatcgctacagtaaaagccaccatccctttactggtggaaacggggccaaagttaaccgcccatttctacgaccgtatgtttactcataacccagaactcaaagaaatttttaacatgagtaaccagcgtaatggcgatcaacgtgaagccctgtttaacgctattgccgcctacgccagtaatattgaaaacctgcctgcgctgctgccagcggtagaaaaaatcgcgcagaagcacaccagtttccagatcaaaccggaacagtacaacatcgtcggtgaacacctgttggcaacgctggacgaaatgttcagcccggggcaggaagtgctggacgcgtggggtaaagcctatggtgtactggctaatgtatttatcaatcgcgaggcggaaatctataacgaaaacgccagcaaagccggtggctgggaaggtactcgcgatttccgcattgtggctaaaacacctcgcagcgcgcttatcaccagcttcgaactggagccggtcgacggtggcgcagtggcagaataccgtccggggcaatatctcggcgtctggctgaagccggaaggtttcccgcatcaggaaattcgtcagtactctttgactcgcaaaccggatggcaaaggctatcgtattgcggtgaaacgcgaagagggtgggcaggtatccaactggttgcacaatcacgccaatgttggcgatgtcgtgaaactggtcgctccggcaggtgatttctttatggctgtcgcagatgacacaccagtgacgttaatctctgccggtgttggtcaaacgccaatgctggcaatgctcgacacgctggcaaaagcaggccacacagcacaagtgaactggttccatgcggcagaaaatggcgatgttcacgcctttgccgatgaagttaaggaactggggcagtcactgccgcgctttaccgcgcacacctggtatcgtcagccgagcgaagccgatcgcgctaaaggtcagtttgatagcgaaggtctgatggatttgagcaaactggaaggtgcgttcagcgatccgacaatgcagttctatctctgcggcccggttggcttcatgcagtttgccgcgaaacagttagtggatctgggcgtgaagcaggaaaacattcattacgaatgctttggcccgcataaggtgctgtga

SEQ ID NO: 127 - DNA, 1146 bp, Staphylococcus aureus
atgcttacagaacaagagaaagacattatcaaacaaacggtgcctttacttaaagagaaagggacagaaattacgtcaatcttttatccaaaaatgtttaaagcgcatcctgaacttttaaacatgtttaatcaaacgaaccaaaaacgaggcatgcaatcttcagcattagcacaagctgtaatggccgcagcggttaatatcgataacttaagtgttattaaaccagtcattatgccagtcgcatataaacactgcgcactacaagtttatgctgaacattatccaattgtggggaaaaatttattaaaagccattcaagacgtgacaggattagaagaaaatgaccctgtcattcaagcttgggcaaaagcatatggcgttattgcggatgtgttcatccaaattgaaaaagaaatttatgatcaaatgatgtggattggttttaaaccattcaaaattaccaatattaaacaagaatctgaagacattaaatcatttacagttgaaactgaagaatatgactttagtgaatttacaccaggccaatacatcacagttgatgtttctagtgataaacttccatatagagctaaacgtcactattctatcgtatcaggtgaaaaaaaccatttaacttttggcgttaaacgtgatgtcacaacagaacatgaaggcgaagtttcaacaattttacacgatgagattaaagaaggcgatatgattaatttagctgcgcctgtaggtggattcgtattagagaatacgactgaaccacaacttttcttaggttcaggtattggtgttacacctttagtagctatgtatgaagctgcctctgccaaaggtttagatacacagatggttcaagttgctgaaaatgaacaacatttacctttcaaagacaacttcaacagtatcgcaagccatcatgacaacgctaaattatatacacacttaaaagataaacaaggctatattggtgctgaagaattacaagtatttttagcaaataaacctgaaatttatatctgtggtggtacaaaattcttacaatctatgatcgaagcacttaaatctttaaattacgatatggatcgcgtacactacgaaacatttattccaagactaagcgttgcagtataa

SEQ ID NO: 128 - DNA, 1191 bp, Salmonella typhimurium
atgcttgacgcacaaaccatcgctacagtaaaggccaccattcccctgctggttgaaacaggaccgaaactgaccgcccacttctacgaccgtatgtttacgcataacccggagctcaaagaaatcttcaatatgagcaaccagcgtaacggcgatcagcgtgaagccctgtttaatgctatcgcggcctacgccagcaatatcgaaaatttaccggcgttgctgccggcggtagaaaaaatcgcgcagaagcacaccagcttccagattaagccggagcagtacaacatcgtcgggacacatctgctggcgacgctggacgaaatgttcaacccgggccaggaagtgctggacgcgtggggcaaagcctatggcgtactggctaacgtctttattcatcgggaagccgagatttatcacgagaacgccagcaaagacggcggctgggaaggcacgcgccccttccgcatcgttgcgaaaaccccgcgtagcgcactgatcaccagctttgagtttgaaccagtcgacggcggtacggtggcggaataccgtcccgggcagtatctgggcgtctggctgaagccggaaggttttgcgcatcaggagatccgccaatattcactgacccgtaaacccgatggcaaagggtaccgtattgccgtgaagcgtgaagacggcggccaggtatcaaactggttacaccatcacgccagcgtaggcgatggggtgcatctggctgcgccggcaggtgacttctttatgaatgtcgccgctgatacccccgtttcgctgatttccgctggcgtcggccagacgccgatgttagcgatgctcgatacgctggcgaaagaacagcataccgcgcaggtgaactggttccacgcggcggagaacggcgacgtccatgcgtttgccgacgaagtgagcgagctgggccgtacactgccgcgtttcactgcccatacctggtaccgcgagccgactgagtccgatcgcgcccaacgcctcttcgacagcgaagggctgatggatttaagcaaactggaagccgcgatcagcgatccagcaatgcagttctatctttgcggcccggtaggctttatgcagtttgccgcaaaacaactggtttcacttggcgtgaataacgaaaacattcattacgaatgcttcggcccgcataaagtgctgtaa

SEQ ID NO: 129 - DNA, 1191 bp, Xenorhabdus nematophila
atgttggatagccaagttatcgctaccgtaaaatccaccatcccactgatcgtttctaccggcccaaaactgaccgcacatttttatgaacgtatgttcaaacacaatcctgaattgaaagatattttcaacatgagcaaccagctaaacggtgctcagcgtgaagcgcttttcaatgctctttgtgcttacgcttccaatatcgataatttacaggcgctattacctgccgtagaaaaaattgctcataaacataccagcctgaatattcagcctgagcattatcagattgttggcactcacctgctggcaacacttgatgagatgtttcatccaggcgatgaagtcctgaatgcatggggtaaggcttacgaggtattggcagatgtctttatcaatcgagaagaagatatttatcaaagaggtgaatctgaggaaggcggttggcgtggattacgtcaattccgtgtcaacaagaagcaaccgcagagtgacgttattaccagcttcgagtttgtgcccgctgatgggggtaaggtcatagattacaaagcagggcaatatttaggcatctacctggacactcccgtttttgaaaaccgagaaatacgtcagtattcactgacaacagcaccaaacaaccacagctaccaaatcgcgattaaacgtgaagcacaaggtaaagtatcaaactatatgcatgataatgtgcaggaaggcgataccatattactggcaccaccacgcggtgactttttccttgatgtccaatcagatacacccgttacactgatttctgctggtgtcgggctgactccgatgatgagtatgctgcaacatctgcataaccaacaccatgtcggtacagtgaattggttccatgccacagagcatggcggttatcatgctttcgcagataaagtgaatacgattacccaatccatgaccaatttacatactcaagtttggtatcgcgagccaagaaacgaagatcaacaaggcgcagattaccagcatatgggactcatggatttatctgtcgtgaaagattcaatcactgaggaaggaatgcaattctatttctgtggccccgtcgtattcatgcaatatatcgcccaacagctcttggcaatcggcattgataaacagcatattcattatgaatgttttggcccacataaagtactttaa

SEQ ID NO: 130 - protein, 398 aa, Streptomyces coelicolor A3(2)
MLSEQSVPVVRATLPAVGAAIGDIAALFYRKLFDAHPELLRDLFNRGNQANGEQQRALAGSVAAFAGLLLENPDERADVLLSRISHKHASLGITPDQYTIVHRHLMAAVVDVLGDAVTPEVARAWDEVYWLMANALIALEARLYTEKGVAEGDVWRTMEIVDRVEESADAVSLVLGSADGRPVVPFRPGQYVSVQVELADGARQIRQYSLSAAPGRSDWRITVKRVRGDGQPDGEVSSWLYANARKGDALNVSLPAGDLALAEHDGPLLLVSAGIGVTPMLSMLDHLAAAGATRPVTVVHADRTPDHHAHRQEQLDLIRTLPGARLHLWYEEPGDRAPEASTGRADLTGLDLPADLTVYLCGPVPFMRAVRGDLLRRGVPAEAIHYEVFGPDLWLGQQ

SEQ ID NO: 131 - protein, 403 aa, Streptomyces coelicolor A3(2)
MLSSQSAQIVRDTLPTVGASLGTITDLFYRRMFEERPELLRDLFNRANQASGVQREALAGAVAAFATALVKHPDERPDAVLGRIANKHASLGITSDQYTLVGRHLLAAVAEVLGDAVTPAVAAAWDEVYWLMANALIAMEARLYARSDVEDGSVWQSMEIVERHEETPDTASFVLRPADGSPTRPFVPGQYVSVRAELPDGAHQIRQYSLSSAPGGGTWRFTVKRERSLDGQVPDGEVSTWLHTHARPGDVLRVSLPFGDLLLPEGDGPLLLASAGIGVTPMLAMLEHLATAAPDRPVTVVHADRSPALHAHRLELTALVERLPHASLHLWYEDTADHPDASADHVNEGWADLTGLSPVPGTTAFLCGPLSFMKAVRTDLLAHGLSPRAIHYEVFGPDLWLSK

SEQ ID NO: 132 - protein, 435 aa, Streptomyces coelicolor A3(2)
MTGRFEFMHQSSHPDRPTTPADDWSGANAAHLAAPARIAAAPASVTDEDVALVRASLTVVTPHVSELAAHFYSILFSRYPQVRDLFPAELDVQRERLVRALLRIVELVDDPDNLVAFCSRLGRGHRKFGTQSGHYPAVGECLLQALSHFAGPAWHPALATAWQRAYTAAADVMVRAAEEDARSRPAVWDAHIVGHVHRGHGIAEITVRPHQPYPFVAGQYVSIETPWAPRQWRQYSPANAPRPNSELTFHVRAVREGKVSNALVHHARPGDPVRLGPPEGDMVLRPTRQRDLLFVAGGTGLAPIRALIEEVAQGSISDAREVSLFIGARTANELYGLDDMLRMSQRYHWLRVRAAVSDERIPGLEGTLPEVLAEFGPWYRHEAYLCGPPQMLSGAVHALRRHGVPPRHIHYDPWDTPVLTAPLGPPPPDEEDDQL

SEQ ID NO: 133 - protein, 512 aa, Rhodococcus sp. RHA1
MTFQVALSFEDGITRFIKCDGDETVADASYRARINIPLDCRDGACGTCKSLCESGTYDGGDYIEEALTDEEAEHGYCLPCQMMPESDLVLQIPTTSDVAKTAAGTFTSTVTEIRKFSDTTIGFTIEIANRDDLVFLPGQYVNITVPGTEATRSYSFSTGPTSKELSFLVKITDGGLMSEYLRSRAQVGDTLEFTGPMGSFFLREQKRRALLLAGGTGLAPLLSILDKMRTDAADHPVHLVYGVSSDADLVELDKLEEYTKSLPQFTFDYCVSDPASSAPNKGYVTGLFEPAHLNDGDVDVYLCGPPPMVEAVRDHLKSEGVTPANFYFEKFNNAATPSGSEASAPPAAETVEAAPEYEIGEEHQPLSESDAQFDARMALELGAMELTIGRMTQEQLSEYRILAETSCESIENDHFTDAGAFTDTNAAFHEFLFRCTANDVLLEAYNRLEVTQLMTKVLRTADWVDEHIQHDHLDIVTAFEKGDRAAAHDLIVSHSAHAKATMCRAIERSAVA

SEQ ID NO: 134 - protein, 403 aa, Cupriavidus necator
MLTQKTKDIVKATAPVLAEHGYDIIKCFYQRMFEAHPELKNVFNMAHQEQGQQQQALARAVYAYAENIEDPNSLMAVLKNIANKHASLGVKPEQYPIVGEHLLAAIKEVLGNAATDDIISAWAQAYGNLADVLMGMESELYERSAEQPGGWKGWRTFVIREKRPESDVITSFILEPADGGPVVNFEPGQYTSVAIDVPALGLQQIRQYSLSDMPNGRSYRISVKREGGGPQPPGYVSNLLHDHVNVGDQVKLAAPYGSFHIDVDAKTPIVLISGGVGLTPMVSMLKVALQAPPRQVVFVHGARNSAVHAMRDRLREAAKTYENLDLFVFYDQPLPEDVQGRDYDYPGLVDVKQIEKSILLPDADYYICGPIPFMRMQHDALKNLGIHEARIHYEVFGPDLFAE

SEQ ID NO: 135 - protein, 403 aa, Cupriavidus necator [sequence omitted]

SEQ ID NO: 136 - protein, 393 aa, Burkholderia sp. TH2
MLSAEHRAIVKATVPLLESGGEALTTHFYKTMLAEYPSVRPLFNQAHQQSGDQPRALANAVLMYARHIDQLEQLGGLVSQIVNKHVALNILPEHYPIVGACLLRAIREVLGAEIATDAVIEAWGAAYQQLADLLIGLEENVYVEKETATGGWRGTRAFVVARKVKESDEITSFYLRPADGGELLEFHPGQYIGLKLIVDGEEIRRNYSLSAAANGREYRISVKREPNGKASNYLHDSVNEGATLDLLTPSGDFTLEHNDKPLVLISGGVGITPTLAMLNAALQTSRPIHFIHATRHGGVHAFRDHIDELAARHPQLKRFYVYEKPRHDDEAHHAEGYIDEARLIEWLPATRDVDVYFLGPKSFMQAVKRHLKTIGVPEKQSRYEFFGPASALD

SEQ ID NO: 137 - protein, 340 aa, Burkholderia sp. TH2
MSSYNIALNFEDGVTRFVTCKAGEKVLDAAFRARINLPMDCSDGVCGTCKCRAESGRYDLGDDYIEDALTEDEKETGLVLTCQMVPQSDCVIAVPASSTVCKTEQSRFAATVAKIDQHNDAAVVLELDVDAAAPVFLAGQYINIDVPGSGQYRSYSFSSAPGESKISFLIKKIPGGVMSTWLESAQQGNKVELVGPLGSFYLRTVERPLLFLAGGTGLAPFLSMLEVLARADSQQTVHLIYGVTRDLDLVQVDAIEAYKAKLPNFSYDTVVADADSNHPRKGWVTQHMPAEILNEGDVDVYLCGPPPMVDAVRKYFDDNGMKPNSFHYEKFTPNAAPRTV

SEQ ID NO: 138 - protein, 336 aa, Pseudomonas sp. S-47
MTHKVALNFEDGVTRFIDANAGETVADAAYRQGINLPLDCRDGACGACKCFAESGRYSLGEEYIEDALSEAEAEQGYVLTCQMRAESDCVIRVPAASDVCKTQQASYQAAISNVRQLSESTIALSIKSASLNQLAFLPGQYVNLQVPGSDQTRAYSFSSLQKDGEVGFLIRNVPGGLMSSFLTSLAKVGDSVSLAGPLGAFYLREIKRPLLLLAGGTGLAPFTAMLEKIAEQGSEHPLHLIYGVTHDHDLVEMDKLEAFAARIPNFSYTACVASPDSAYPQKGYVTQYIEPKHLNGGEVDVYLCGPPPMVEAVSQYIRAQGIQPANFYYEKFAASA

SEQ ID NO: 139 - protein, 408 aa, Pirellula sp.
MLSEKTIRIVKEITPLVAANAETITRRFYERMFEANPEVKAFFNQAHQHSGGQQKALAGAICAYFTHIDNPAVLMPAVELIAQKHVSLGIKPEHYPIVGSNLLAAIGDVMGDAATPEIVEAVSEAYGFLADIFIGREGAIYEEQASMPGGWNGTRTFVVTKKVRESEIVTSFYLKPEDEGPLPPFKPGQYITVHMDHPHTPTSPRNYSLSDCASQPHYRISVKREERLVPDAPDGLISNHLHDGIEEGHRIELGPPCGEFTVDPATIAKPIVLIAGGIGVTPLLSMAKSIVHANPNAELHFIQAARNSKVHAFADELRRLAQAGPNVHTKVIYDSPLPGDVEEGKCDEAGFVTENQIRESTPFTDADFYFCGPKPFMKNVHSCLRELGVDEHRVRYEFFGPKEELVAV

SEQ ID NO: 140 - protein, 405 aa, Neisseria meningitidis MC58
MEIILGIVMFTVIVLVLALMILFAKSKLVSEGDITIKVNGEKELTMPAGGKLLGALANEGIFIPSACGGGGSCGQCRVVVKSGGGDILPTELSHISKREAREGCRLSCQVNVKTDMDIEVPEEVFGVKKWECTVISNDNKATFIKELKLAIPEGEEVPFRAGGYIQIEAPPHTVAYKDFDIPKEYHEDWDKYNLWQYVSKVDEPILRAYSMASYPEEKGIIMLNVRIATPPPRVPDAPPGQMSSYIWSLKPGDKVTISGPFGEFFAKDTDAEMVFIGGGAGMAPMRSHIFDQLKRLNSKRKITFWYGARSKREMFYVEDFDQLAAEFPNFTWHVALSDPLPEDNWDGYTGFIHNVVYENHLKNHEAPEDCEFYMCGPPIMNQSVIKMLKDLGVEDENILLDDFGG

SEQ ID NO: 141 - protein, 405 aa, Neisseria meningitidis Z2491
MEIILGIVMFTVIVLVLALMILFAKSKLVSEGDITIKVNGEKELTMPAGGKLLGALANEGIFIPSACGGGGSCGQCRVVVKSGGGDILPTELSHISKREAREGCRLSCQVNVKTDMDIEVPEEVFGVKKWECTVISNDNKATFIKELKLAIPEGEEVPFRAGGYIQIEAPPHTVAYKDFDIPEEYHEDWDKYNLWQYVSKVDEPILRAYSMASYPEEKGIIMLNVRIATPPPRVPDAPPGQMSSYIWSLKPGDKVTISGPFGEFFAKDTDAEMVFIGGGAGMAPMRSHIFDQLKRLNSKRKITFWYGARSKREMFYVEDFDQLAAEFPNFTWHVALSDPLPEDNWDGYTGFIHNVVYENHLKNHEAPEDCEFYMCGPPIMNQSVIKMLKDLGVEDENILLDDFGG

SEQ ID NO: 142 - protein, 342 aa, Burkholderia sp. NK8
MSSYNIALNFEDGVTRFVECKAGEKVLDAAFRAKINLPMDCSDGVCGTCKCRAESGSYDLGEDYIEDALSDDEKEGGLVLTCQMVPQSDCVIAVPASSTACKTAQSKFAAKVTKVAPHNDAAVVLELDVDAAASAPVFLPGQYVNIDVPGSGQHRSYSFSSAPGETKISFLIKKIPGGVMSTWLESAETGSTVELTGPLGSFYLRAVERPLLFLAGGTGLAPFLSMLEVLARANSQQKIHLIYGVTRDLDLVQVEAIEAYTAKLSNFTFSTVVADADSDHPRKGWVTQHMPAESLNDGDVDVYLCGPPPMVDAVRKHFDDNGVKPNSFHYEKFTPNAAPVTA

SEQ ID NO: 143 - protein, 381 aa, Xylella fastidiosa Dixon
MPLLAEHGTTIIEAMYHRLFEDPQIEALFNQANQKNGTQIHALAGAILAYARNIDNPGVLASAIERISQKHVGYAIHPEHYPHVATALLGAIKQVLGDVATSEVLEAWGEAYWFIANLLKDREAVIREGIMTKNGGWIHWRRFVISKRIPESETITSFMLHPEDGGPVVPHQAGQYLTFRFDAAGMPGMKRNYSISCGPNSDYYRITVKREHGTGASAFLHDQAKVGTIIECTPPVGDFFLPSVIERPIVLLSGGVGLTPMVSMMEQIAEAHPDAQVWYVHGTQNRETHAMDAHIRALVSRHKHMKATTFYTQRSEADDAEAGFITIDWLRANTPFQKADFYLCGPRPFLRTFVRDLIGAGVPAAQVHYEFFGPMDEEMAA

SEQ ID NO: 144 - protein, 381 aa, Xylella fastidiosa Ann-1
MPLLAEHGTTIIEAMYHQLFEDPQIEALFNQANQKNGTQIHALAGAILAYARNIDNPGVLASAIERISQKHVGYAIHPEHYPHVATALLGAIKQVLGDVATSEVLQAWGEAYWFIANLLKDREAVIREGIMTKNGGWIHWRRFVISKRIPESETITSFMLHPDDGGPVVPHQAGQYLTFRFDAAGMPGMKRNYSISCGPNSDHYRITVKREHGTGASAFLHDQAKVGTIIECTPPVGDFFLPSVIERPIVLLSGGVGLTPMVSMMEQIAEAYPDAQVWYVHGTQNRETHAMDAHIRALVSRHKHMKATTFYTQRSEADDAEAGFITIDWLRANTPFQKADFYLCGPRPFLRTFVRDLIGAGVPAAQVHYEFFGPMDEEMAA

SEQ ID NO: 145 - protein, 381 aa, Staphylococcus aureus subsp. aureus N315
MLTEQEKDIIKQTVPLLKEKGTEITSIFYPKMFKAHPELLNMFNQTNQKRGMQSSALAQAVMAAAVNIDNLSVIKPVIMPVAYKHCALQVYAEHYPIVGENLLKAIQDVTGLEEHDPVIQAWAKAYGVIADVFIQIEKEIYDQMMWIGFKPFKITNIKQESEDIKSFTVETEEYDFSEFTPGQYITVDVSSDKLPYRAKRHYSIVSGEKNHLTFGVKRDVTTEHEGEVSTILHDEIKEGDMINLAAPVGGFVLENTTEPQLFLGSGIGVTPLVAMYEAASAKGLDTQMVQVAENEQHLPFKDNFNSIASHYDNAKLYTHLKDKQGYIGTEELQAFLANKPEIYICGGTKFLQSMIEALKSLNYDMDRVHYETFIPRLSVAV

SEQ ID NO: 146 - protein, 336 aa, Dechloromonas aromatica RCB
MTYRIALNFEDGVTRFIDCKPTETVADAAYRQSINVPIDCRDGACGACKCSCESGSFRLGEYIDDALSADEAAQGMVLTCQMYPQGDCVVRVPASSDVCKTKQASFNATISDLRQLSDSTISLTLSGEALNKLAFLPGQYANLAVPGTPQHRAYSYSSMPKEGSVSFLIRNVPGGLMSGYLREQAKAGDSITMAGPLGSFYLREIKRPVLMLAGGTGLAPFLAMLDKVVADGGSAHAIHLIYGVNTDTDLVELDKLAAFAATLPNFTYALVVVAADSAQPKKGYVTQHIEPAQLNDGDVDIYLCGPPPMVEAVAQNLRERAIQPASFHYEKFAASV

SEQ ID NO: 147 - protein, 349 aa, Dechloromonas aromatica RCB
MARIIMQPSGKSVDCAYGDTVLMALEKAGYALPNNCRAGACGECKVKVTQGQFDQGMVLDMALSQDERKQGFGLMCMAKPISEELTIEWGTEDAKPKLFPPREDALFVVTDKKQIAARVVELRLRPVGQPIRYWPGQYVTLGNPRADIPARAYSISNAPRPDGELVLQVARADSGVTSNWVHDTLQAGDNVKVSGAYGTFIGDPSVDTPVLCIAAGTGLAPVLALAEAALRRGFKKPVTMLFSARTKEDVYSQGMMAWWRTKHRNFDYKVTLTREEADGFLKGRVDVVLPQLFKDLSKHTIFIAGSPEFVDSCVAAAKAQGALDELIHTEGFFAQQQPVVADADHLLPL

SEQ ID NO: 148 - protein, 392 aa, Pseudomonas putida KT2440
MLNAEQRAIIKATVPLLESGGEALTTHFYKMMLSEYPEVRPLFNQAHQASGDQPRALANGVLMYARHIDQLEQLGGLVGQIINKHVALQILPEHYPIVGSCLLRAIEEVLGKDIATPAVIDAWGAAYGQLADILIGAEENLYKEKEEAEGGWRGTREFRLVRREQESSEIVSFYFAPVDGMPVLKAEPGQYIGLKLDIDGAEQRRNYSLSALCDGKEYRISVKREAGGKVSNYLHDELKVGDTLQLFPPAGDFTLAASDKPLVLISGGVGITPTLAMLQAALQTRREVHFIHCARNGAVHAFRDWIDGLAARHPQLKRFYCYAEPEGGAAADAVGLLSEDLLAEWLPQERDVDAYFLGPKGFMAAVKRQLKGLGVPEQQSRYEFFGPAAALE

SEQ ID NO: 149 - protein, 397 aa, Xylella fastidiosa 9a5c
MSASFSPHTITLIKSTVPLLAEHGTTIIEAMYHRLFEDPQIEALFNQANQKNGTQIHALAGAILAYARNIDNPGVLASAIERIAQKHVGYAIHPEHYPHVATALLGAIKKVLGDVATSEVLEAWGEAYWFIANLLKDREAVIREGIMTKNGGWIHWRRFVISKRIPESETITSFMLHPEDGGPVVPHQAGQYLTFRFDAAGMPGMKRNYSISCGPNSDHYRITVKREHGTGASAFLHDQAKVGTIIECTPPVGDFFLPSVIERPIVLLSGGVGLTPMVSMMEQIAEAHPDAQVWYVHGTQNRETHAMDAHIRALVSRHKHMKATTFYTQRREADDAEAGFITIDWLRANTPFQKADFYLCGPRPFLRTFVRDLIGAGVPAVQVHYEFFGPMDEEMAA

SEQ ID NO: 150 - protein, 536 aa, Rhodococcus sp. 19070
MSFQVALSFEDGVTRFIKCGPNETVADASYKARINIPLDCRDGACGTCKALCESGNYDGGDYIEEALTDDEAEQGFCLPCQMVPESDLVLQIATTSDVAKTAAATYTATITDLQRFSPSTVGFTVEIPNRDDLVFLPGQYVNITVPGTEQTRSYSFSTGPNDPQLSFLVKITEGGLMSEYLSDRAQVGDTLQFTGPFGSFFLRERKRPALLLAGGTGLAPLLAILSKMQEEGSDLPVHLVYGVSFDQDLVELDKLEAYTRSLPNFTFDYCVSDPESTAPNKGYVTGLFEPKHLNDGDVDVYLCGPPPMVEAVRTHLSDEGISVTNFYFEKFNNSATPGAAEPAPRPTERELEAATRAAEETGLPVSLGAAEQVPVGNYEIGEEHPPVTESDAQFDARMALELGALELTIGRLTDAQLVEFRILAEASTASIDHDRFTDAGAFTDTNAAFHEFLFRCCGNPVLLEAYNRLEVTQLMRKVLRTAQWVDEQIPHDHLQIVRAFERKDRAAARDLIVSHAEHAKATMRRAIEESAKVELA

SEQ ID NO: 151 - protein, 504 aa, Cryptococcus neoformans var. grubii
MDAKKATIAIIALAAAATAYKVMSTTQEKKNTEGVCPATGQKRAGSTGCPFSSGLPLPDPGHRCDPNSIQEEYKVPEVPPLTEAQKDIIKSTAPILEQHGVTITTHFYKNMIRAHPELRDVFSESAQKLGHQPAALAAAVYAYACNIHDLTPILPVVERIAHKHTSLHITANQYGIVGKHLIQAIVDILGDAVTPEVGDAWYNGYWNLAHVFIKRERQLYDSAIEAGGWEGWRQFKVAKRVKESNEITSFYLKPVEGSGAPLPKFRPGQYTAVQIDIPGLGYKQARQYSLSDAPNGEYFRISVKREDGVPVPTLSNPEVPFHPGWMSNVLHKDYQEGSIVNVASPFGDFYYAPSDSSPTAPLVLLSAGVGQTPVMAMLNAQLAKNNEPNSPIKPITYVTVARSPKVRAFKDHVKKLSDVHENVKSRIFYSRPTDDVVEGQDYDFKGRMDLEKIKEDLYLGDKTAEYYICGPSKFMLNTRDKLQSLGVDPSRIHYELFEAGNLSA

SEQ ID NO: 152 - protein, 397 aa, Xylella fastidiosa Temecula1
MSASFSPHTITLIKSTVPLLAEHGTTIIEAMYHRLFEDPQIEALFNQANQKNGTQIHALAGAILAYARNIDNPGVLASAIERISQKHVGYAIHPEHYPHVATALLGAIKQVLGDVATSEVLEAWGEAYWFIANLLKDREAVIREGIMTKNGGWIHWRRFVISKRIPESETITSFMLHPEDGGPVVPHQAGQYLTFRFDAAGMPGMKRNYSISCGPNSDHYRITVKREHGTGASAFLHDQAKVGTIIECTPPVGDFFLPSVIERPIVLLSGGVGLTPMVSMMEQIAEAYPDAQVWYVHGTQNRETHAMDAHIRALVSRHKHMKATTFYTQRSEADDAEAGFITIDWLRANTPFQKADFYLCGPRPFLRTFVRDLIGAGVPAAQVHYEFFGPMDEEMAA

SEQ ID NO: 153 - protein, 364 aa, Xanthomonas campestris pv. campestris str. ATCC 33913
MRIVHPMNSAPARMPKSPLPTRLARRLVSPQLFDFWATRINPLWTLERPMARLVARTPASRDAVTLLFQPNGHWQGLQAGQHVSIGVEIDGRRLLRSYSPTVLADGRLAITVKAITGGLVSTYLAGEAPLGAVVSLDPAFGDMLLPTTPAPLLLLAAGSGITPMRALLQAAAAAGMPMDVDLLYWVRQRDEACFLDEFEALAAAHPRLRAQLLTTREGAAPAPRIDSFPLEQVTALQDRHVMACGPGGFVQAARARLQDRVARFQAEAFSVPVLDDGEAGQVQVQLSRSGRTLTLSRGQSLLEGLEAQGLRPKHGCRMGICNSCACARQSGTTRHLLTGERSSEPTAQVRLCISAASTDLILDL

SEQ ID NO: 154 - protein, 140 aa, Campylobacter jejuni subsp. jejuni NCTC 11168
MTKEQIQIIKDCVPILQKNGEDLTNEFYKIMFNDYPEVKPMFNMEKQISGEQPKALAMAILMAAKNIENLENMRSFVDKVAITHVNLGVKEEHYPIVGACLLKAIKNLLNPDEATLKAWEVAYGKIAKFYIDIEKKLYDK

SEQ ID NO: 155 - protein, 142 aa, Campylobacter coli
MTQEQIQIIKDCVPILQKNGEDLTKEFYKIMFNDYPEVKPMFNMEKQASGEQPKALAMAILMAAKNIENLENMRSFVDKVAITHTKLNVKEEHYPIVGACLLKAIKVVLYADETTLKAWEEANKAIAQFYIDIEKEIYAKAK

SEQ ID NO: 156 - protein, 144 aa, Clostridium perfringens str. 13
MLDQKTIDIIKSTVPVLKSNGLEITKTFYKNMFEQNPEVKPLFNMNKQESEEQPKALAMAILAVAQNIDNLEAIKPVVNRIGVIHCNAKVQPEHYPIVGKHLLGAIKEVLGDGATEDIINAWAKTYGVIAEVFINNEKEMYASR

SEQ ID NO: 157 - protein, 248 aa, Clostridium perfringens str. 13
MENVWNGFRQLEIFKIEEEAKDIKSFYLRATDGKPLKEYKCGQFLPLKIETDDEVIKKEMRRYSLSGDPKKNYYRLTIKRVPNGKVSGYFHESINVGDTILAMPPFGNFTLTEDSNKPLVLLSGGIGITPILSMLYGAKEQSRDIYFVEAVLNSDNLALNSDVQGIKKVKNFKEIKIFSEPLESDIKGKDFDEEGFITKEWIKNNLPLNGEFFFCGPTLFMKSIRNSLKDLGVKEDNINFEFFGKEEF

SEQ ID NO: 158 - protein, 404 aa, Corynebacterium efficiens YS-314
MIGVSRPTPQNSYPGGSTVIVSTKPLTDRSRLSEAHAEMIKATLPLVGSKINDITPVFYNRMFTAHPELLRSTFNRANQKQGDQQKALAASIATFATMLVDPEAPDPVDMLARIGHKHVSLGITADQYNIVHEHLFGAIVEVLGADVVTPPVAEAWDAVYWLMANVLIDLESDLYASNDLAPGDVFRHVTVTGKKQLSDKVWEYTFEGDLVTPAPGQYTSIGVKLPDGARQLRQYSLLSGTDSQYRIAVEDNGEVSTFLRDNVEVGDTIEASVAAGDLVMNDDVNPVVLISQGIGSTPMVGMLNQVAADRHVTVLHADQSEKDHAQREEMVALVGGLANGALYTFYRDADQWLNVAGHIPSDASVYLCGGNEFLQNVRGQLENLEEQPREIRFELFSPNDWLIS

SEQ ID NO: 159 - protein, 394 aa, Vibrio vulnificus YJ016
MLSENTINIVKSTAPLLAETGPKLTAHFYQRMFEHNPELKDIFNMSNQRNGDQREALFNAICAYASNIDNLPALLGAVEKIAHKHSSFLITADQYQIVGSHLLATIDELFSPGQAVLDAWAEAYGVLANVFIQREEQIYQANQSQTGGWRGLREFELVEKQYESAHICSFVFKPVDGGSVVSFKPGQYLGIYINDEQFENQEIRQYSLSSSVRPDCYRISVKREEGGRVSNYLHDHLDVGSKVKLAAPAGDFFLDAAPTAPVVLISAGVGLTPTLSMLESLTEHQAPVTWIHATENGQQHAFKQHVKQLVETHPHFNSLVWYNQPNSDDKIGDDFQFSGWVNLHEIETVLKQADVQVYFCGPVGFMQFIAKQLLEMGVPEQQFHYECFGPHKVV

SEQ ID NO: 160 - protein, 386 aa, Corynebacterium glutamicum ATCC 13032
MIVSTQPITDRSALSAEHAEVIKATLPLVGGKINEITPVFYNKMFAAHPELIANTFNRGNQKQGDQQKALAASIATFATMLVTPDAPDPVQLLSRIGHKHVSLGITADQYDIVHEHLFAAIVEVLGAETVTAPVAEAWDAVYWIMANVLIGFENNLYASNDLEPGDVFREVTVTAKKQLSATVWEYTLAGELVAPEPGQYTSIGVVLDDGARQLRQYSLLGGSDTEYRIAVEDNGEVSGFLRDRVSVGDKIEATIAAGDLVLNKDTNPVVLISQGIGSTPMVGMLAGMNPERDVVVLHADQAESTYAQVEEVQGLVEKLPKAAFEIFYRDNDQWLEVAGRIPSGASVYLCGGVEFLKNVREQIEALDEQPRDVNFELFAPNDWLIS

SEQ ID NO: 161 - protein, 396 aa, Shigella flexneri 2a str. 301
MLDAQTIATVKATIPLLVETGPKLTAHFYDRMFTHNPELKEIFNMSNQRNGDQREALFNAIAAYASNIENLPALLPAVEKIAQKHTSFQIKPEQYNIVGEHLLATLDEMFSPGQEVLDAWGKAYGVLANVFINREAEIYNENASKAGGWEGTRDFRIVAKTPRSALITSFELEPVDGGAVAEYRPGQYLGVWLKPEGFPHQEIRQYSLTRKPDGKGYRIAVKREEGGQVSNWLHNHANVGDVVKLVAPAGDFFMAVADDTPVTLISTGVGQTPMLAMLDTLAKAGHTAQVNWFHAAENGEVHAFADEVKELGQSLPRFTAHTWYRQPSEADRAKGQFDSEGLMDLSKLEGAFSDPTMQFYLCGPVGFMQFTAKQLVDLGVKQENIHYECFGPHKVL

SEQ ID NO: 162 - protein, 396 aa, Escherichia coli CFT073
MLDAQTIATVKATIPLLVETGPKLTAHFYDRMFTHNPELKEIFNMSNQRNGDQREALFNAIAAYASNIENLPALLPAVEKIAQKHTSFQIKPEQYNIVGEHLLATLDEMFSPGQEVLDAWGKAYGVLANVFINREAEIYNENASKAGGWEGTRDFRIVAKTPRSALITSFELEPVDGGAVAEYRPGQYLGVWLKPEGFPHQEIRQYSLTRKPDGKGYRIAVKREEGGQVSNWLHNHANVGDVVKLVAPAGDFFMAVADDTPVTLISAGVGQTPMLAMLDTLAKAGHTAQVNWFHAAENGDVHAFADEVKELGLSLPRFTAHTWYRQPNEADRAKGQFDSEGLMDLSKLEGAFSDPTMQFYLCGPVGFMQFAAKQLVDLGVKQENIHYECFGPHKVL

SEQ ID NO: 163 - protein, 394 aa, Thermobifida fusca
MLSTQSADIVRATLPVVGAHLDEITSRFYSTMFSERPELLDGLFNRGNQANGEQRRALAGSIAGFASALLANPDERPDALLARIAHKHAAVAVTDDQYVIVHKYLFGAIADVLGDAATPEVIAAWDEVYWLMGGALIALEARLYAEKNADNGRTWREWTIVDRREETPDVFSLVLRPSDGGPLPEARPGQYVSVLHRMPDGIRQIRQYSISGGDEHTRRITIKRVRGTEHTPEGEMSALLYATAKAGDTLTVSAPFGDVVLTDSDRPLVFATAGIGCTPIVGMLNYLAATGATRRILALHADRSRAEHALWQETSTLIARLPHAQYVVWYEEGDGGLPGQMDLTGLEIPADAEVYLCGPLPFMREIRTQFLAAGVPAKDIHYEVFGPDLWLPAD

SEQ ID NO: 164 - protein, 674 aa, Microbulbifer degradans 2-40
MKRLQPSQFHQAEKAVQKRLGVADMVAQHSEGYIRSTMPGQHRDFFTNLPMVIVSITDFDGFPWPIPLHGKPGFIKSPNANTLEIETYPTLKDVLKLNFKKSQKIGILGIELHTRRRNRMNGTIKEINNNSFLVICEQSFGNCPQYIQKRELHWVDTPQKCLQTEDIFLTNTLTSTCAEWIESSDTFFISSRTKRLSTDKRDGLDVSHRGGKPGFVKVENDTLYFPDFSGNQFFNTLGNIQSDSRVGLYFPDYESGKIILISGTAKIIWDKELTRIFEGAERIISVKVRNCLILDSFLPMRGVLTELSPSLIRTGTWENPQEKSAARVYKQFKIIKKIKESRDVTSFYIRPLDGSALSSYLPGQFLPISIKQPHTSSTCLRTYTLSQAPLSNAYRFSVKREKFGLASRILHDTINTGDSLYVSQPEGKFTLQTNKKTNVLLSAGIGITPMIAMLQGLIREVEKGEKPQDVYFIHSTQNSETHTFANELKHLNKRHKWLQLYTIYSQPKLNDKLGQHYDVSGRISLDLLRKILPTDNFDVYLCGSESFMRSSYTNLKAMGIAESRIFYEFFDDGSFESHQLNKFQTAQRAEIYFAKSNITATWTPNDGTLLQFAEKMGLKPMYSCRTGNCGTCSCTLSTGEVTYANKPGYTPANGSALICCARPALNTTKLTFHI

SEQ ID NO: 165 - protein, 393 aa, Pseudomonas fluorescens PfO-1
MLSVQDRAIVKSTVPLLESGGEALITHFYRMMLSEYPEVRPLFNQAHQASGDQPRALANGVLMYARHIDQLDQLGDLVAKIINKHVALQILPEHYPIVGTCLLRAISEVLGEEIATPEVMSAWGAAYGQLAEILIGAETAIYDQKEQAVGGWRGAREFIVAAKVEESAEIISFYFEPADKGPILAAEPGQYIGMKLVLDGEEIRRNYSLSALANKGQYRISVKREPGGRASNYLHDQLHVGASIQLFPPSGEFTLTASDKPLVLISGGVGITPTLAMLEAALETERPVYFIHSARNGSVHAFRDWIDGLAARHPQLKRFYCYAEDDGVSPAADKVGLLSEEQLGEWLPAERDVDAYFLGPKGFMGAIKRHLKALGVPEKQSRYEFFGPAAALE

SEQ ID NO: 166 - protein, 393 aa, Pseudomonas aeruginosa UCBPP-PA14
MLSNAQRALIKATVPLLETGGEALITHFYRTMLGEYPEVRPLFNQAHQASGDQPRALANGVLMYARHIDQLQELGPLVAKVVNKHVSLQVLPEHYPIVGTCLLRAIREVLGEQIATDEVLEAWGAAYQQLADLLIEAEESVYAASAQADGGWRGVRRFHVARKQAESEEITSFYLEPVDGQPLLAFQPGQYIGLRLDIDGEEVRRNYSLSAASNGREYRISVKREAGGRVSNHLHDRVAEGDELDLFPPAGDFVLRDSDKPLVLITAGVGITPALAMLQEALPQARPIRFIHCARHGGVHAFRDWIEDVSAQHEQVEHFFCYSEPRVGDSPDAEGVLSREKLADWLPQERDLDAYFLGPRPFMAQVKRHLADLGVPSQQCHYEFFGPAAALDA

SEQ ID NO: 167 - protein, 317 aa, Pseudomonas aeruginosa UCBPP-PA14
MIEVIVGAIRLEAQDIHSFELFRADGAALPSFEPGAHIDLHLPNGLVRQYSLCGPAERPRHYRIAVLRCRDSRGGSATLHAELRVGQRLRIGEPRNLFPLSPEPGPRLLFAGGIGITPLLAMAERLARDGANFQLHYCAHSAERAAFVDYLDRCAFADRVHCHFDHGDSSRRADLRALLAASPRDAQLYLCGPAGFMQWIEESARELGWEASRLHREHFAAAPRDANADGTFEVQLASNGALIRVAAGQTVLAALREAGVDLPASCEQGICGTCLTRVLDGEPEHRDLYLSEEEQAANDCFTPCCSRSRSPRLVLDL

SEQ ID NO: 168 - protein, 393 aa, Pseudomonas aeruginosa PAO1
MLSNAQRALIKATVPLLETGGEALITHFYRTMLGEYPEVRPLFNQAHQASGDQPRALANGVLMYARHIDQLQELGPLVAKVVNKHVSLQVLPEHYPIVGTCLLRAIREVLGEQIATDEVLEAWGAAYQQLADLLIEAEESVYAASAQADGGWRGVRRFRVARKQAESEEITSFYLEPVDGQPLLAFQPGQYIGLRLDIDGEEVRRNYSLSAASNGREYRISVKREAGGRVSNYLHDRVAEGDELDLFPPAGDFVLRDSDKPLVLITAGVGITPALAMLQEALPQARPIRFIHCARHGGVHAFRDWIEDVSAQHEQVEHFFCYSEPRAGDSADAEGLLSREKLADWLPQERDLDAYFLGPRPFMAQVKRHLADLGVPSQQCHYEFFGPAAALDA

SEQ ID NO: 169 - protein, 317 aa, Pseudomonas aeruginosa PAO1
MIEVIVGAIRLEAQDIHSFELFRADGAALPSFEPGAHIDLHLPNGLVRQYSLCGPAERPRHYRIAVLRCRDSRGGSATLHAELRVGQRLHIGEPRNLFPLSPEPGPHLLFAGGIGITPLLAMAERLARDGADFQLHYCAHSGERAAFVDYLGRCAFADRVHCHFDHGESSRRADLRALLATSPRDAQLYLCGPAGFMQWIEESARELGWEASRLHREHFAAAPRDASADGTFEVQLASNGALIRVAAGQTVLAALREAGVDLPASCEQGICGTCLTRVLDGEPEHRDLYLSEEEQAANDCFTPCCSRSRSPRLVLDL

SEQ ID NO: 170 - protein, 396 aa, Salmonella enterica subsp. enterica serovar Typhi Ty2
MLDAQTIATVKATIPLLVETGPKLTAHFYDRMFTHNPELKEIFNMSNQRNGDQREALFNAIAAYASNIENLPALLPAVEKIAQKHTSFQIKPEQYNIVGTHLLATLDEMFNPGQEVLDAWGKAYGVLANVFIHREAEIYHENASKDGGWEGTRPFRIVAKTPRSALITSFEFEPVDGGTVAEYRPGQYLGVWLKPEGFAHQEIRQYSLTRKPDGKGYRIAVKREDGGQVSNWLHHHANVGDVVHLAAPAGDFFMNVAADTPVSLISAGVGQTPMLAMLDTLAKEQHTAQVNWFHAAENGDVHAFADEVSELGRTLPRFTAHTWYREPTEADRAQRVFDSEGLMDLSKLEAAISDPAMQFYLCGPVGFMQFAAKQLVSLGVNNENIHYECFGPHKVL

SEQ ID NO: 171 - protein, 394 aa, Vibrio vulnificus CMCP6
MLSENTINIVKSTAPLLAETGPKLTAHFYQRMFEHNPELKDIFNMSNQRNGDQREALFNAICAYASNIDNLPALLGAVEKIAHKHSSFLITADQYQIVGGHLLATIDELFSPGQAVLDAWAEAYGVLANVFIQREEQIYQDNQSQTGGWRGLREFELVEKQYESAHICSFVFKPVDGGSVVSFKPGQYLGIYINDEQFENQEIRQYSLSSSVRPDCYRISVKREEGGRVSNYLHDHLDVGSKVKLAAPAGDFFLDAAPTAPVVLISAGVGLTPTLSMLESLTEHQAPVTWIHATENGQQHAFKQHVKQLVETHPHFNSLVWYNQPNSDDKIGDDFQFSGWVNLHEIETVLKQADVQVYFCGPVGFMQFIAKQLLEMGVPEQQFHYECFGPHKVV

SEQ ID NO: 172 - protein, 396 aa, Erwinia carotovora subsp. atroseptica SCRI1043
MLDNHTIAIVKSTIPLLAETGPKLTAHFYDRMFTHNPELKDIFNMSNQRNGDQREALFNAICAYATNIENLAALLPAVERIAQKHTSFNIQADQYQIVGNHLLATLDEMFSPGQEVLDAWGKAYGVLANVFIQREDDIYRSTETKTGGWSGVRPFRIVNKQLQSSVITSFTLEPTDGQPIADFQPGQYLAIYIKHDSFANQEIRQYSLTHAPNGKSYRIAVKREAQGTVSGYLHDTAREGDIVHLAAPHGDFFLDIPTDTPVALISGGVGQTPMLGMLHTLKQQDHQAKVLWLHAAENGTAHAFTDEIEQTGQALPHFDHHIWYREPQQTDRPGEDYHHSGLMQLASLKGELTTPDMHYYLCGPVVFMQFVAQQLLAMGIPAEQLHYECFGPHKVV

SEQ ID NO: 173 - protein, 406 aa, Oceanobacillus iheyensis HTE831
MSNTTVLLDKKTTEIIKATVPVLKEHGEAITKHFYKILLENNPELKNVFNQTNQRKGAQSKALANTVYAAAANIEKLEEILPHVKQIAHKHVSLNIKPEQYPIVGKYLLIAIKEVLGDAATDEIIEAWEKAYFVIADIFISVEKEMYNEKKNQIGGWTGFRDFKVIKKVKESKEITSFYLKPDDNLPITTFIPGQYITIKAQIESEAYVHLRQYSLSTAPGKDYYRISVKREASNQPIGVVSNYLHTSVEVGSVLPISAPAGDFILDERDHRPLVLISGGVGLTPIMSMLESVVEHQPNRNVVFIHAAKSIDHQAMRKRVSEIAKSKEQVKQYVVYSNPTNRTDGDKQGYIDYEWLKEVIPTKDAAFYLCGPKPFMSAINNDLQNMNIAQNDIHMELFGPLEPIAK

SEQ ID NO: 174 - protein, 402 aa, Bacillus cereus ATCC 10987
MLSEKTIEIVKSTVPLLQEKGVEITTRFYEILFSEHPELLNIFNHTNQKKGRQQQALANAVYAAATYIDNLEVIIPVVKQIGHKHRSLGIKAEHYPIVGTCLLRAIKEVAGAPDEVLNAWGEAYGVIADAFISIEAEMYEEAAHKEGGWKDFRNFVVVKKVKESDVITSFYLKPEDGGKVSSFIPGQYVTVQINIEGETYTHNRQYSLSDAPGKEYYRISVKKEKGVDTPDGKVSNYLHDHVKEGDMLPVSAPAGDFVLNMDSTLPVVLISGGVGITPMMSMLNTLIEQDSKRNVCFVHAALNSNTHAMKEHVEALDNEYEQVKAYTCYSAPTEKDLEMKNFDKEGLIEAEWLQTIIPTTEAEFYFCGPVAFMKHINATLTDLGVKQEHIHYEFFGPAASLQ

SEQ ID NO: 175 - protein, 394 aa, Vibrio parahaemolyticus RIMD 2210633
MLSNQTIEIVKATAPLIAETGPKLTAHFYDRMFTHNPELKDIFNMSNQRNGDQREALFNAICAYAANIENLPALLGAVEKIAHKHTSFLITKDQYQIVGKHLIATIDELFNPGQEVLDAWAEAYGVLANVFIQREEQIYQANASQEGGWRGLREFELVGKQLESEHICSFVFKPTDGSKVTKYKPGQYLGIYINSDKFENQEIRQYSLSSSVQENTYRISVKREQGGKVSNYLHDELNIGDKVKLAAPAGDFFMDVDTNTPVVLISAGVGLTPTLSMLESLTEHHAPVTWVHATENSKHHAFKEHVNQLVTAKENMNALIWYNQPTAEDKIGEDFHFTGFVNLHEIEAALKQDNVQVYFCGPVGFMQHVAKQLQELGVPQEQFHYECFGPHKVV

SEQ ID NO: 176 - protein, 399 aa, Bacillus subtilis subsp. subtilis str. 168
MLDNKTIEIIKSTVPVLQQHGETITGRFYDRMFQDHPELLNIFNQTNQKKKTQRTALANAVIAAAANIDQLGNIIPVVKQIGHKHRSIGIKPEHYPIVGKYLLIAIKDVLGDAATPDIMQAWEKAYGVIADAFIGIEKDMYEQAEEQAGGWKEYKPFVIAKKERESKEITSFYLKPEDSKPLPEFQAGQYISIKVRIPDSEYTHIRQYSLSDMPGKDYYRISVKKDGVVSSYLHDGLQEGDSIEISAPAGDFVLDHASQKDLVLISAGVGITPMISMLKTSVSKQPERQILFIHAAKNSEYHALRHEVEEAAKHSAVKTAFVYREPTEEDRAGDLHFHEGQIDQQFLKELIANTDADYYICGSPSFITAMHKLVSELGSAPESIHYELFGPQLSLAQSV

SEQ ID NO: 177 - protein, 139 aa, Aquifex aeolicus VF5
MLSEETIRVIKSTVPLLKEHGTEITARMYELLFSKYPKTKELFAGASEEQPKKLANAIIAYATYIDRLEELDNAISTIARSHVRRNVKPEHYPLVKECLLQAIEEVLNPGEEVLKAWEEAYDFLAKTLITLEKKLYSQP

SEQ ID NO: 178 - protein, 587 aa, Bradyrhizobium japonicum USDA 110
MMARLLSVNVGLPRDVAWQGKTVHTGIWKAPVEGPRRVRRLNIDGDGQGDTAGHGGEQRAVFVYQDESYRYWQEHLGRPDLVHGQFGENFTVEGLADTNVCIGDRYRIGSALFEVTQPRVTCYRLGIRMDEPDMPALLVRHGRPGFYFRVIEEGDVEAGDEITLLANGPESMSVFEINALLYLPPHPRDRLERALRIPALSRGWNRSFASLLEQQRTSKIAAGNAGLGPAASPPPAWRGFRPFRVSRKIAESGTVTSLILEPTDGHRAAPALPGQFVVVRLGPSEAQAMTRSYSLSSRSDAPPYRISIKREAHGAASLYIADSLRVGDVVEVGAPRGSFTLRQDARPVVLLSAGIGVTPVLAMLHALVAEGSTRDVWWLHGARNGREHAFAAETRGLLAGLAHYHSHVCFSAPDPADRPGADFDSAGHLDQHLIERLNMPRDGDFYLCGPAAFMSDLTAGLAALGVAPDRIHTELFGARPSLTPGIAASPRTPAHAPVGAPGPGPMVSFARSGLNVRWGPSYASLLELAEACDVPVRWSCRTGVCHNCESGLVAGEVSYAPDPLDPPADGNVLICCSQPKADVVIDL

SEQ ID NO: 179 - protein, 402 aa, Bacillus cereus ATCC 14579
MLSAKTIEIVKSTVPLLQEKGVEITTRFYQILFSEHPELLNIFNHTNQKKGRQQQALANAVYAAATYIDNLEAIIPVVKQIGHKHRSLGIKAEHYPIVGTCLLRAIKEVAGAPDEVLNAWGEAYGVIADAFISIEAEMYEEAAHKEGGWKDFRNFVIVKKVKESDVITSFYLKPEDGGKVSSFIPGQYVTIQINIEGETYTHNRQYSLSDAPGKEYYRISVKKEKGVDTPDGKVSNYLHGHVKEGDVLPVSAPAGDFVLNMDSTLPVVLISGGVGITPMMSMLNTLIEQDSKRNVYFVHAAINSNTHAMKEHVKAVENEYEQVKAYTCYSAPTEKDLEMKNFDKEGFIESEWLKTIIPTTEAEFYFCGPVAFMKHINAALTDLSVKQEHIHYEFFGPATSLQ

SEQ ID NO: 180 - protein, 410 aa, Aspergillus nidulans FGSC A4
MSLSPEQIQLIKATVPVLQEHGTTITKVFYDNMLTAHPELKTVFNVSNKVHGHQPQALAGALFAYASYIDNLGVLSPAVERICHKHASLAIQPDGYQIVGKFLLEAMGQVLGDALTPPLLEAWAAAYWQLANIMIGKEAELYKSADGWTDFRDFRVARKEPESDVITSFYLEPVDGKPLPSFLPGQYVSIQVQVPQLNHAQCRQYSLSDQPKPTYYRISVRKDLGLDASDPSAPAHPGYVSNILHDNINVGDIVKLTHPYGDFHLTDAAASSPLVLISAGVGLTPMTSMVNTLRTAESNTRPVHFIHGAHTSASRAFQAHLQSLPNLKTTYFLTAPTESDKQGENYTYKGRVDLSKIADEDLFLGDKQTEYYICGPTAFMLDTQKALVARGVDQSRVHMELFGTGGVPAA

SEQ ID NO: 181 - protein, 426 aa, Aspergillus nidulans FGSC A4
MLKNVLRRGALRLVRQRASYATSALTPQQKQIVKATIPALEQHGVTITTLFYKEMLERHPELNNIFNSSHQATGVQPAALAHAVWAYASNIDHPEALATAVSRIGHKHASLGVRSEHYPIVGEHLLRAIKKVLGDAVTPPVADAWTAAYQQLADIFISFEDDLYKQATQTPGGWTGWRKFVIADKVHESEEIISFQLVPQDNGRLPTYKPGQFVSVRCFVPELGVYQPRQYSLSDIPNQRYFQISVKKEFASGARPAGRISNVLHESLPKGSEVEISMPFGDFVLDTNATTPVVLMSGGVGLTPMMSMLKTVTNNSKSRPAVFVHAVRNGRVHAMKETLANIMTDNPQVKRAIFYEQVEEGDKQGVDYDYVGRVDVSKIKDLVFLPDADYYICGPSPFMKAQSEALETLGVRPDRIHMEVFGSPTP

SEQ ID NO: 182 - protein, 400 aa, Streptomyces avermitilis MA-4680
MLSEQSAATVRATLPAVGAAVGEITARFYDRLFAARPELLRDLFNRGNQAAGTQRQALAGSIAAFATYLVEHPDERPDAMLDRIAHKHASLGIAPGQYAVVHEHLFAAIAEVLGDAVTPEVAAAWDEVYWLMANALIAIERRLYAQHENTGDTGGRRPWRVVERVDETADVAAFRLRPADGRPLPDFRPGQYVSVRVELPDGARQTRQYSLVGAPGSPELRIAVKRVHGGTTPDGEVSNHLHARVREGSVLELSAPYGDLALEATDVPLLLASAGIGVTPMIAMLEHLALTGHRAPVTVVHADRSPAEHALRADHEAYAAKLADAAVHFWYEHPEPGHPADRTGLVDLTGVPVSAGTRAYLCGPLPFMRAVRTQLIEKGVAPADIHYEVFGPDLWLARES

SEQ ID NO: 183 - protein, 565 aa, Streptomyces avermitilis MA-4680
MFEARHTMDAPTTTSADNGTSGGTGGAGWFTPRKQPETPQGGGQEAPEGSRLAAMRPVGRPSAGEGTEQQRIPPTEEAVVAPTQPMSGEPLRSLPDPAAPAPARHLGATLTEETRPAPAPIAASQPESAHEALRPLAGQPQFGQPQSGPVQPQPAAALPERGIPQREPGPPEPGSPRPGPDPQVPTPGPAPGPEASPDAVLIRRTMAEVGPVAGKVTSYFYALLFVRHPDLRSLFPAAMDTQRDRLLKALLTAAEHIDNTEVLVAYLQNLGRGHRKYGTRPEHYPAVGECLIGALSRYASGIWDEETEAAWVRAYTTISQVMIDAAAADELRAPAWWYAEVVSHDLRTPDIAVITVRPDQPYPFLAGQYTSLETPWWPRIWRHYSFASAPRSDGLLSFHVKAVPAGWVSNALVHRARPGDIIRLGPPAGSMTVDHTTESGLLCLGGGTGIAPIKALVEDVAEHGERRPVEVFYGARRDHDLYDIDTMLRLQQSHPWLSVRPVVDQRAHLQLPDVIREYGPWNEYDAYLSGPPGMIRSGVDALRGIGIPPDRIRHDSVEELVAAGD

SEQ ID NO: 184 - protein, 251 aa, Streptomyces avermitilis MA-4680
MTETFVPPTRFAVPGRIAVSNRAAAVWQTATLTEIRRETPHAATFRFAVPGWQGHLPGQHLMLRLTAEDGYGAQRHYSIASPPEDAGHIELTLDHVEGGEVSGWFHTVAEPGDEVQVRGPLSGFFAWPGDRPALLIGAGSGVVPLMSMVRHHRAQGSTVPLRLLVSARSPQELIYAREYGDETTPVFTRDAAAGVPVGRMSAAHVAPLLDRAPPGGWEAYVCGSNGFAEHASRLLVEAGQPVHRIRIERFG

SEQ ID NO: 185 - protein, 339 aa, Actinobacillus pleuropneumoniae serovar 1 str. 4074
MANTNKNPLCINELQVYSIVQEAPHVKTINFIAQDFYPYQAGQYALVSIKNTPHITRAYSLSSTPGESRFVSITVREIEGGVGSTWLNNEVKVGDQVWFSNPMGEFSCQHVLADNYLLVGAGSGVTPIMSMARWLLANRPKVNLTVIHSVHSPEDVIFKSEWQELKAKYPQLNLVMNASVGATEGFASGRISAEIIKNAVPNVSDYTVMTCGPEAYMAALKNIVLELGVSEDRFFTEAFFNTSLAGEISSDKKTTLTINAAKQIKAEVPVGMTLLAALEAQEQPVVSGCRTGLCGLCKTKVTGGEYEVVGTGDLTEEEIAQGYVLACSCRVKENVSVSL

SEQ ID NO: 186 - protein, 457 aa, Gibberella zeae PH-1
MALSYQQTKLIRGTIPALTDHGERITTIFYRNMLRDHPELNDYFNTVNQANGRQPRALTAVILSYANNINHITELIPKMERMCHKHCSLGIKPEHYAIVEKYLIAAFAEVLGPTMTTQIREAWTKAYWMLAKMLIGREAQLYRDFGKWQGYRKFRIEKKVEESDDIYSFYLVPVDGKRLPSFQPGQYVSVQIPIVDKGYVQSRQYSLSDAPRPDYYRVTVKRDEGIHMTRSGRYLGGDALNPGVVSNLLIDMKDEGDVVELAHPAGEFYLDMSNTSNVPIVLISAGVGVTPMMSILNTVSERQPHRPVSWIHGSRRSVPFYDQVRRIARNRSNFRTNIFKTHLAESDIFGVTYDHDFRMDLAKVSKDDLYLCHSSTEYYICGPEQFMLEMAEYLKAQKVDASRMHFELFSTGDMEFKVDNLSISSASKSPSIASAEQRCPSTGAVSADGATCPFSAV

SEQ ID NO: 187 - protein, 415 aa, Gibberella zeae PH-1
MALTAAQVAIVKSTAPILKEHGKTITTTFYRNMLGAHPELKNYFSLRNQQTGAQQAALANSVLAYATYIDDLGKLSHAVERIAQKHVSLFIKAEHYPIVGTHLIGAIGEVLGSALTTEIKDAWVAAYGQLADIFIQREGQLYDAAGEWNSWRKFKIAKKEAENDSVTSFYLEPLDDKPLPKFLPGQYVSLQIPIPELDGLLQSRQFSLSEAPGSNHYRISVKLQGPEEEPSLEDLSAGKIPGLVCTRLHKRYNVGDEVELSPPAGEFFLNPADTSAAKKPLVLLSAGVGATPLVSILDSVLESETASRPITWIHGARYSGSTCFVPHVLDSAKKHDNITAKIFLEDVKEGDQYDFKGEIDLDQLQKDKLLQLDSSDAEYFICGPEDWMVKVRAFLEENGVPRERQHLELFKTGDV

SEQ ID NO: 188 - protein, 398 aa, Candida albicans SC5314
MTVEYETKQLTPAQIKIILDTVPILEEAGETLTQKFYQRMIGNYDEVKPFFNTTDQKLLRQPKILAFALLNYAKNIEDLTPLTDFVKQIVVKHIGLQVLPEHYPIVGTCLIQTMVELLPPEIANKDFLEAWTIAYGNLAKLLIDLEAAEYAKQPWRWFKDFKVTRIVQECKDVKSVYFTPVDKDLLPLPKPERGQYLCFRWKLPGEEFEISREYSVSEFPKENEYRISVRHVPGGKISGYIHNNLKVGDILKVAPPAGNFVYDPATDKELIFVAGGIGITPLLSMIERALEEGKNVKLLYSNRSAETRAFGNLFKEYKSKFGDKFQAIEYFSEDNNTDDKIVIDKAFNRKLTTDDLDFIAPEHDVYLVGPREFMKDIKEHLGKKNVPVKLEYFGPYDP

SEQ ID NO: 189 - protein, 398 aa, Candida albicans SC5314
MTVEYETKQLTPAQVKIILDTVPILEEAGETLTQKFYQRMIGNYDEVKPFFNTTDQKLLRQPKILAFALLNYAKNIEDLTPLTDFVKQIVVKHIGLQVLPEHYPIVGTCLIQTMVELLPPEIANKDFLEAWTIAYGNLAKLLIDLEAAEYAKQPWRWFKDFKVTRIVQECKDVKSVYFTPVDKDLLPLPKPERGQYLCFRWKLPGEEFEISREYSVSEFPKENEYRISVRHVPGGKISGYIHNNLKVGDILKVAPPAGNFVYDPATDKELIFVAGGIGITPLLSMIERALEEGKNVKLLYSNRSAETRAFGNLFKEYKSKFGDKFQAIEYFSEDNNTDDKIVIDKAFNRKLTTDDLDFIAPEHDVYLVGPREFMKDIKEHLGKKNVPVKLEYFGPYDP

SEQ ID NO: 190 - protein, 400 aa, Candida albicans SC5314
MTVASASIINNYFESKPLTPEHIQIIIDSVPILEHLDVQLTEKFYKRLLKQNPEFKPFFNETHQKLLRQPRIMIHFLIQYAKNIQDLTPMIDFIKKIASKHVGLQVKPEHYPKLGQVLINVIINLFPKQLVHDEFIEAWTLAYQNLANLLIKLESEQYVEKPWYGFKQFKVTRLQRECSDVKSLYITPVDGSPIPKPKRGQYLCMRWLLPGEKHEITREYSISEYPKNNEYRITVRYIPGGKVSNYIHNNINVGDIVYSGPPCGDCVYESSSKNLVFLAGGNGVTALLPMIEAGLTEGRQVKLLYSNRSTDSRSFGKLFQSYKLQYGDRFQVVEFLSRGRTIDPIDKFYRRSLTLEDLDFIVPEDDVYLIGPRTYMKMIEDYLKDRNITVKLDYFGPREI

SEQ ID NO: 191 - protein, 400 aa, Candida albicans SC5314
MPIDINTKAKCYFDTRPLTKGERKIIKDSIPILEYLDIQFGEKFFKRLIKQFPQYKPYFNETHLKLLRQPRSFHHCLLEFARNIDDLRPMKDFIMRIASKHVARQVSPDQYRVFGQVLVEVMMDQFPKEFVDQEFVEAWTMAFRILANILINIEVREYQDKPWYGFKAFRVTRLQPECVGTKSFFITPVDGTPVPIPKRGQYLCMRWKFPGEKQERLREYTISEFPKNNEYRITVRYIPGGKVTTYIHEKLAVGDIVQVSPPCGDCYYRSSKRNMVMLAGGNGVVALAPMIEKGLAEGRKVKFLYSNRSTETRSFGQFFRDLKQKYGDQLEVVEYLSRRRVIDPIDKYYRRSLTVEDLDFIVPEDDVYLIGPRTYMKMIEDYLKGRGVNVTLDYFGPQEV

SEQ ID NO: 192 - protein, 447 aa, Magnaporthe grisea 70-15
MSAVRDKQQPDAAPAAAAAGNKPAPSITPEQVAVVKSTAPVLKEHGVTITTVFYKNMIDAHPELHNVFSTTSQATGAQPRALASAVLAYATHIDDLARLSHAVSRIAHKHVSLHITPDQYDIVGKYLIEAIGQVLGDAATPEIVAAWIAAYGVLADVFIGVEGKMYQEHSDWLGFRKFRVLRKEAEAESITSFYLAPSDGKTPLPRFLPGQYVSVQLFVPELGYLQSRQYSLSEGYRKGGEHYRISVKREEGVEVGAPGIISNMLHDKISVGDEVEVSHPQGEFFVDPADATKAGAPLVLLSAGVGATPLLSILESVTVADGGVPAPAATRPVSWIHASRSRAQRPFETRVAEIQKTVGEERLRSRLFLGKIDAEKDVANQHFHFGGGRMDLDKLDADRDLHTSDARAEYYLCGPEAWMLDTREKLEQMGVAHERIHLELFATGDVQ

SEQ ID NO: 193 - protein, 417 aa, Pirellula sp. 1
MRSSTKAPPMLSEKTIRIVKEITPLVAANAETITRRFYERMFEANPEVKAFFNQAHQHSGGQQKALAGAICAYFTHIDNPAVLMPAVELIAQKHVSLGIKPEHYPIVGSNLLAAIGDVMGDAATPEIVEAVSEAYGFLADIFIGREGAIYEEQASMPGGWNGTRTFVVTKKVRESEIVTSFYLKPEDEGPLPPFKPGQYITVHMDHPHTPTSPRNYSLSDCASQPHYRISVKREERLVPDAPDGLISNHLHDGIEEGHRIELGPPCGEFTVDPATIAKPIVLIAGGIGVTPLLSMAKSIVHANPNAELHFIQAARNSKVHAFADELRRLAQAGPNVHTKVIYDSPLPGDVEEGKCDEAGFVTENQIRESTPFTDADFYFCGPKPFMKNVHSCLRELGVDEHRVRYEFFGPKEELVAV

SEQ ID NO: 194 - protein, 438 aa, Pirellula sp. 1
MSPSLFFAAIFCGSCFLLFVGSADAIEEWEWKRLTRKRLPKLRSGKAIDAVSAKLADQSASAAKPDVTNHPSRWKGWRSASVQSVKDESLDCRSFVFVPTDGEPFPPFLGGQYLTVRLKDPSSGKNVSRCYSLSSGPDEPHYRITVKRVPGGTMSNLLHDTIDVGDRIEIQAPKGRFHYSVEESQSANLEPLNLVAAGIGITPMLSMLFQSLNERTDRDVNLFYQVRNAVDAPFLAPIREIAKMLEATTGVRVHLWFSKPEDDDLRPGDSVGRLSAERIVERLGHHRGEYLICGPDVFMNAIAEGLIECGASADRVMFESFGGKSKSAGALAVPACDPCSDASDVDESNSDDSVGWNVTFQTSGKSASFEAGMDGLLDVAESLDVDVDSGCRSGDCGACVRRLLSGEVRYAETPECDVEDGEAVLCVAKPVSEVVVDA

SEQ ID NO: 195 - protein, 403 aa, Deinococcus radiodurans R1
MLTPEQKAIVKATVPALEAHGETITRTFYASMFAAHPELLNIFNPANQQTGKQARSLAASVLAYAAHIDHPEALGGMVGRIAHKHVSLEVLPEHYPIVGQYLLGAIAGVLGDAAKPEILDAWAAAYGELADLMIGIEKGMYDAGAGQPGGWRDFRPFRVARKVAESRVITSFVLEPVGGGALPAYQPGQYLSLKVKVPGQERWQIRQYSLSDAPSPDHYRISVKREGGGLVSEYLHGAVQEGDELLVHVPAGDFVLQQSERPVVLISAGVGITPMLAMVQTLAQAGSQRPVTFIHAAQNGSVHAFRDDVARLTHEYPHFRKVVFYDEAGPDDQLGTHHDVAGRLSLDAVRGALPAGEAEFYYCGPAGFAGAVEAILDDLQVPAERRFTETFGPSQSFAPVILG

SEQ ID NO: 196 - protein, 324 aa, Methylococcus capsulatus str. Bath
MTSITYGGNTYPLDKDQSVLDCLVGHGAPVPFSCRSGVCQTCLMRAVRGVPPEDSQRGLKDSLKLQNYFLACVCHPTNDLEAALPQEVVRSLPATVTALEPLNSEIMHVSLECHAPLEYRAGQFINLFREPTLGRSYSLASVPQHDEHLHLHVRRLPQGKVSGWIHEHLRIGQTVEIRGPSGDCFYVPGRPEQELVLIGTGSGLAPLYGILRDALQRGHSGPIRLFHGSRNRAGLYLTDRLRELAREYPNFDYVPCVSGEEPAPGLAAGRAHEIAFMEIPDFKDKRLFLCGHPEMVSAAKRRAFLAGAAMKDIYADPFNVNAAP

SEQ ID NO: 197 - protein, 396 aa, Photorhabdus luminescens subsp. laumondii TTO1
MLDNQTIATVKSTIPLLSATGPKLTAHFYERMFKHNPELKNIFNMSHQLNGDQREALFNAICAYAANIDNLKVLLPAVEKIAHKHASLNIQPEHYQIVGTHLLATLNEMFQPGNEILDAWGKAYGVLADIFINREEQIYHSGELTDGGWRGLRPFRINRKEVKSEVICSFEFAPQDGGKVMDYKPGQYLSIYLQDDSFANREIRQYSLTAAPNGSSYRIAIKREPQGIVSNHMHDKMQEGDTVWLTAPRGDFFLDIKPETPVTLISAGVGLTPMMSMLYHLHQQNHNSPINWLHAAEHGGHHAFSHEVAAIAQAMPNFAGTIWYREPRDEDQQGIHYQHKGFMDLTVLNEALKTEGMHFYFCGPVAFMQYVAKQLLDMGIDKQFIHYECFGPHKVI

SEQ ID NO: 198 - protein, 394 aa, Vibrio cholerae O1 biovar eltor str. N16961
MLTQEHINIIKSTIPLLESAGPALTQHFYQRMFSHNPELKHIFNMTHQKTGRQSVALFEAIAAYAKHIDNLAALTSAVERIAHKHTSFNIQPEHYQIVGHHLLETLRELAPDAFTQPVEEAWTAAYFFLAQVFIDREGALYLERKQALGGWRDGRTFVVREKQVESAYVTSFVLVPADGGAVLDYQPGQYIGIEVTPEGSDYREIRQYSLSHASNGREYRISVKREGVGSDNPGLVSHYLHNNVKVGDSVKLYAPAGDFFYVERERPVVLISAGVGATPMQAILHTLAKQNKSGVTYLYACNSAKEHTFAQETAQLIAQQGWMQQVWYRDESADDVLQGEMQLAELILPIEDGDFYLCGPIGFMQYVVKQLLALGVDKARIHYEVFGPHAQLAA

SEQ ID NO: 199 - protein, 404 aa, Chromobacterium violaceum ATCC 12472
MLSEQTRSLVKATVPVLQQHGVALTSHFYRRMFEHNPELKNVFNQGHQHSGQQQQALAMAVLAYARHIDDPSPLLPVLTRVAHKHVSLGIRAEHYPIVGKHLLASIRELLGEAAGDDLIQAWAEAYGLLADTLIGIENGMYGDATSADGGWSGWRPFRVAKKEIESEEIASFYLEPSDGGALPAFKPGQYVSVKRFVAEWGLSQPRQYSLSDAPNGEYLRISVKREDAAQGKPAGRVSNLLHREVQVGDVLELSAPQGDFFLHEERDGPAVLISAGVGQTPMQAMLGQLLKRGGREVRFLHAARHGGAHAMGAKVRQLADRHPQLKVHVCYETPRAQDAIGVDYQAAGRLNLADVKGIALLPDADYYLCGPLGFMRAQRDSLRGLGVAADRIHYEVFGSHPGDD

SEQ ID NO: 200 - protein, 660 aa, Chromobacterium violaceum ATCC 12472
MSDSPPIPWHSGEREMQRRAGSLEHMAATGPRVVRDHMPEQHRDFFRQLPFMVMAAVDEAGRPWAGIVEGRPGFVDSPDPRSLRIAAQPSPADPLRDCLRPGAAVGLLGIELHTRRRNRMNGELTAMDDGGFAVAVGQSFGNCPKYIQLREFEFSREPGPRILGSVEWMDELDDDARAAIAAADTFFVASAVQDSHGRWQADASHRGGKPGFVKMDGDTLTIPDFAGNGYFNTLGNLLLQPRAGLLFVDFASGDTLQLAGRAEVPDTETPPPFAGAERWWTFRVERVVRRRNALALRWTLREYSPFALATGAWPHAAPERQWLPLRVVHAEDESDAVRSIYLEPADGSAPPPFLPGQHLSLKVAGVDGVRMRNYTLSQTGGYRISVKRQGKASARLHQLAPGDIVEALPPRGDFTLARADRPIALLAGGIGITPLLAMLHQLTARPAAMPPTLLAYATRTIAERAFDAELEALQAKAAGRLRIVKAASQPETGRRLGVDYQHAGHVDIDLLRRNGLSLDGDFYLCGPAGFMQALYEQLIAAGVDDKRIHAEAFGPAGIQRIGQVAGKRPPPADHAVPVRFSASSIDAEWRPGQSLLELAESCGLNPDFSCRGGACGSCRAALLSGEATYLQPPEYAARSGEILLCCAYPAEGSGKLEINL

SEQ ID NO: 201 - protein, 1123 aa, Bordetella bronchiseptica RB50
MEQVTGYCTLCRSRCGSVNHVENGRLVAVTPLAGHPTGGALCAKGRAAPEMMAESHRLLRPLRRTNPRGAADPGWREIEWSEALDEVAARLAVARRRDGAESVAFAVTTPSGTPMVDSFEWVERFVRVFGSPNLIYAVEVCGWHKDYAHALTFGRGIGVPDLEHTDTMLLWGHNPARTWLAQAARIAAARQRGARVVVVDPNREGSSQQADLWLRVRPGADGALALGAIRHLLHTGRFDHGFVARWSNGPYLVDGASGALLRAADLWPDADPAARVVMLDGRPAASGRGADTARAELFGSWTLRLHDGRACEAVTVMHALRVAVERYTPDEVARLAWLDEAELAQFNAIFENAPRLSYHSWTGVGQHTNATQTDRAIATLYALTGACDRKGGNLWTVAPPYRAVNGYRELLSPVQRAKALGLDELPLGPPSLGWITARDFCRAVLQQDPYPVRTLVSFGTNLLVSQAETARNLEALQALDFHVHVDMSMNPTAMNADIVLPANMPWEREALKLGFEITQAAVEHVQLRPRMVEPAGESRADYEIVLELARRLGLRDAFFGADMDACWNHQLAPLGIDVQALRRQPEGIRFPQPFAHEKYKTLRDGQPVGFPTHDGRVQIHCAALHDIGQPALPSHVEPADTPARHAGAYPLVLSTAKSGWFVHSSHRYVASLRRKSPDPQVYLSTEAARDRGIASGDWVRVRTPYGEVALRAKINADLHANVAIAEFGWWQGCEGLGRADGAIVGPASSNINAIMTDRHRDPVSGSVPLRATVCDIVRDDARNRGSWSGAREFVLARKRGIAHDVAEFRLLACDAQALPDFLPGQHVIVSMPGGAVRRAYSLTGPNRAPAHLSIAVRRVRDGDGPAGLMSNALHALDEGARVLLSAPAGVFTPPLRTARPVILMASGIGITPFHGYLEALAQDAGPAPSVLLVHACRDGSSHPYGAELKRLAQRIGSVRTLTVYAEPASHDVPGRDYQQRGRLDFAWLSPETVAARPLVYLCGSPGFLALCTDALAARGIPRFDIFSETFTSEKRVPDTLAPQPIEIEAEQGGFTWDPAAGTLLDAAERAGLSLPSGCRVGQCESCAMHIVSGQVAHLIDFDGSADTCLTCQAVPITPLTLRR

SEQ ID NO: 202 - protein, 402 aa, Bordetella parapertussis 12822
MLSPEVRALVKATAPVLKEHGEALTRHFYTRMLGGNPELRQLFNQGHQQSGQQQQALAAAVAAYAEHIDDPSVLLPVVERIAHKHVSLGVRAEHYAIVGKHLLASIREVLGEAATDELIDAWAAAYGQLADLLIGRERALYAAAASRDGGWTGWRAFKVVRKTPESAEITSFYLAPADGGATPDYLPGQYVSVRVYVPELGLMQPRQYSLSEAPGMPGQLRISVKREAGSPAGMVSGTLHNRINEGDVLDVSPPQGDFTLDAEDGRPVVLLSGGVGLTPMVSMLNHLTARDDGRQIRFVHACREAGVHAMKEHINALAAKRPNVRKAVFYERVGADDRRGVDYDYEGRVDLHAIRDEVILPDADYYLCGPLPFMQAQRRALADLGVAEHRIHAEVFGTGGVA

SEQ ID NO: 203 - protein, 402 aa, Bordetella pertussis Tohama I
MLSPEVRALVKATAPVLKEHGEALTRHFYTRMLGGNPELRQLFNQGHQQSGQQQQALAAAVAAYAEHIDDPSVLLQVVERIAHKHVSLGVRAEHYAIVGKHLLASIREVLGEAATDELIDAWAAAYGQLADLLIGRERALYAAAASRDGGWTGWRAFKVVRKTPESAEITSFYLAPADGGATPDYLPGQYVSVRVYVPELGLMQPRQYSLSEAPGMPGQLRISVKREAGSPAGMVSGTLHNRINEGDVLDVSPPQGDFTLDAEDGRPVVLLSGGVGLTPMVSMLNHLTARDDGRQIRFVHACREAGVHAMKEHINALAAKRPNVRKAVFYERVGADDRRGVDYDYEGRVDLHAIRDEVILPDADYYLCGPLPFMQAQRRALADLGVAEHRIHAEVFGTGGVA

SEQ ID NO: 204 - protein, 1128 aa, Bordetella pertussis Tohama I
MGKGNMKQVTGYCTLCRSRCGSVNHVENGRLVAVTPLAGHPTGGALCAKGRAAPEMMAESHRLLRPLRRTNPRGAADPGWREIEWSEALDEVAARLAVARRRDGAESVAFAVTTPSGTPMVDSFEWVERFVRVFGSPNLIYAVEVCGWHKDYAHALTFGRGIGVPDLEHTDTMLLWGHNPARTWLAQAARIAAARQRGARVVVVDPNREGSSQQADLWLRVRPGADGALALGAIRHLLHTGRFDHDFVARWSNGPYLVDGASGALLRAVDLWPDADPAARVVMQDGSPAASGRGADTARAELFGSWTLRLHDGRACEAVTVMHALRVAVERYTPDEVARLAWLDEAELAQFNAIFENAPRLSYHSWTGVGQHTNATQTDRAIATLYALTGACDRKGGNLWTVAPPYRAVNGYRELLSPVQRAKALGLDELPLGPPSLGWITARDFCRAVLQQDPYPVRTLVSFGSNLLVSQAETARNLEALQALDFHVHVDMSMNPTAMNADIVLPANMPWEREALKLGFEITQAAVEHVQLRPRMVEPAGESRADYEIVLELARRLGLRDAFFGADMDACWNHQLAPLGIDVQALRRQPEGIRFPQPFVHEKYKAVRDGQPVGFPTQDGRVQIHCAALRDIGQPALPVHVEPADTPARHAGAYPLVMSTAKSGWFVHSSHRYVASLRRKSPEPQVYLSVQAARARGIASGDWVRVRTPYGEVALRAKINADLHENVAIAEFGWWQGCEGLGRVDGAIVGPASSNINAIMTDRHRDPVSGSVPLRATVCDIVRDDARNRGSWSGAREFVLAQKRGIAHDVAEFRLLPCDAQALPDFLPGQHVIVSMPGGAARRAYSLTGPNREPAHLSIAVRRVRDGDGPAGVMSNALHELAEGARVLLSAPAGVFTPPLRTARPVILMASGIGITPFHGYLEALAQDAGPAPSVLLVHACRDGSSHPYGAELKRLAQRIGSVCTLTVYAEPASDDAPGRDYQQRGRLDFAWLPPATVAARPLVYLCGSPGFLAFCTDALAARGIPRFDIFSETFTSEKRVPATLAPQPIEIEAEQGGFTWDPSAGTLLDAAERAGLSLPSGCRVGQCESCAMHIVSGQVAHLIDFDGSADTCLTCQAVPITPLTLRR

SEQ ID NO: 205 - protein, 314 aa, Bordetella pertussis Tohama I
MKLVVRAVTPLTAEIRHFELAAPDGAALPAYTPGAHLSVHVVLPDGTPARREYSLLGDGSATASYEIAVQCREPAAGSAWMHRLAPGDRIEAEAPVNAFALAADAAEHVLIAGGIGITPILSMARHLRGAGAAFTLHYAGRARAAMAFAEEAAAMGAACRLYHDDGAPLHEALPNILAAPAPGRHLYVCGPRALIADTVDGAAAAGWPPASVHYELFQGALALRGDQPFDLVLRQSGITVSVPAGQIMLDALLQAGVEPLYDCRRGECGMCLTPVLEGKPDHRDHYLSPREREAGDAVCVCVSRACGASLTLDL

SEQ ID NO: 206 - protein, 402 aa, Bacillus anthracis str. Ames 0581
MLSEKTIEIVKSTVPLLQEKGVEITTRFYEILFSEHPELLNIFNHTNQKKGRQQQALANAVYAAATYIDNLEAIIPVVKQIGHKHRSLGIKAEHYPIVGTCLLRAIKEVAGAPDEVLNAWGEAYGVIADAFISIEAEMYEEAAHKEGGWKDFRNFVVVKKVKESDVITSLYLKPEDGGKVSSFIPGQYVTVQINIEGETYTHNRQYSLSDAPGKEYYRISVKKEKGVDTPDGKVSNYLHDHVKEGDMLPVSAPAGDFVLNMDSTLPVVLISGGVGITPMMSMLNTLIEQDSKRNVCFVHAAINSNTHAMKEHVEAVDNEYEQVKAYTCYSAPTEKDLEMKNFDKEGFVEREWLQTIIPTTEAEFYFCGPVPFMKHINAVLTDLGVKQEHIHYEFFGPAASLQ

SEQ ID NO: 207 - protein, 362 aa, Mycobacterium avium subsp. paratuberculosis str. k10
MRMTMAQAIWENIPADLYGRRKRDRMYTALYGVGALFGGLASASRWTPARVVPVRRTTTAVVTQREELAPDVVAFTLADPHGGLLPSWTPGAHIDVRLPSGRRRQYSLCGPPGRRTDYRIAVRRIEDGGGGSIEMHDTFRVGDALEFEGPRNAFYLVTDERDVLFVIGGIGVTPILPMIQTAQQHGINWRAVYAGRSRDDMPLLDEVVAVAPERVSVWADDERGRIPTAADLLAEAGPATAVYVCGPTAMLEAVRTARDEHADAPLHYERFGPPPVVDGVPFELELARSRRVLTVPGNRSALEVMLDRDPATPYSCQQGFCGTCKVKVLAGQVDRRGRTVEGDDEMLVCVSRAKNDRLVIDA

SEQ ID NO: 208 - protein, 384 aa, Exiguobacterium sp. 255-15
MLTPSAITIIKSTVPVLAEHGHSITRVFYQRLFENHPEMKHIFNQSNQKNDRQSQALATAVYAAAAYIDQLETLKPTLLPVLHKHRSLQIKPYMYDIVGTELIGAIQDVLKDAATPDIIDAWTAGYGEIAKLFISLEAELYQQDEQATDFEGYQPFVIETMTTESSDIKAFTLRPADGRPLAPYQTGQYVTVRLQAPDGLWQNRQYSLTTVANGTSYTIGVKQDGSVSRQLHGLSVGEKVLLSAPAGSFTLTDASTPFVGLAGGIGLTPLLAMTEAALAVGRKTTLYVAVQDDLDRPFAEQLARFEEQGATIIRYAERNALPGTTPGRLSVADVTNIDPAADTYVCGPEAMIQFVRRYFSGQADKLHFEVFGPSLALEAPTAVS

SEQ ID NO: 209 - protein, 391 aa, Ralstonia eutropha JMP134
MLREHGLAITTHFYREMFAARPELTQLFNMGNQANGSQQQSLASAVFAYAANIDNANALAPVVERIVHKHAAVGLKPAHYPIVGRHLLGAISAVLGEAATPDLIAAWDEAYWLLAGELIAAEARLYQSTGMAAGERIAVRVDRREVQSDTVVALTLSAVDGQPLRDFRPGQYVSVEVTLDDGNRQQRQYSLSAERGLPTWQISVKREDGDHATPAGAVSNWLHANAQPGTELSVSAPFGDFAPRLDNHRPIVLLSAGIGITPMLSVLRTLAAQGSRREILFAHAARDGRHHAHRADVAWARERLPQLRTHISYEQPQAADVAGRDYDHAGTMPVAALLDAPDNRLFIDGDFHLCGPLGFMQAQRHALISAGVPVGHIHREVFGPDLLDDLL

SEQ ID NO: 210 - protein, 1142 aa, Ralstonia eutropha JMP134
MSEVEKKGFCTLCRSRCGTVNVVDGETLVAVRPDGDHPTGKAMCLKGKAAPELVHSADRILYPMRRTHPKGADDPGWVRISWDEALDEIAARLLHARATRGAESVAFAVTTPSGTALSDSIDWIERFVRLYGSPNICYATEICNWHKDFAHAFTFGCGMPTADYRNAGLILLWGHNPTNTWLSQAEAIGAGRAGGARLIVVDPRQTALAEDADQWLRVKPGSDAALAMALANLMIEANAFDIDFVRRWTNGPLLVRQDNGAFLRGGDIGLADTDALLVWDARQRMAVPAGKGVDDAQHIALRGTFAIPRIGGGERKSLLCQPAFDLYAAECARYTVERAAALTWIPEGDIRHAASLIGAAGRIAYHAWSGVGQHENATQTERAIACLYALTGSFDRRGGNRVYSKPPFNAVSRFDLLSPDQAHKALGLDARPLGPPAQGWVTAPDLYRAITHHAPYAVTSLIAFGTNTLLSQPDVANAEQALRELELYVHCDLFENPSARHADILLPVNTPWEREGLRIGFEVSADAEQFVQLRQRMVAPLGESRSDNDIVFALAARIGLDEAFFGGSLEAGWNHMLAPTGLTVAALRDAPEGIRVLVEDVEMKYAAGTDGQPFNTPTGLVELYSERLLRHGYPPLPGLPESAWNDAGQTSASFPYLMTSAKNGYYCHSQQRGVASLRRKALLPQLDISSDIAAARNIRTGDPVRVSTPAGSARFTARVQPGLHPAVVVGEYGWWQGCDPMGQQPTAVLGTDSANFNALIDATRQDPVSGSSPLRCCHCNVERDATLDIRRRRWEGYRPFRIVGLRKEATDVTAVDLEPADGGRLPDYLPGQHVTIRLCVDTGQQEVVRSYSLTGPAVVADRRRYAIAVRHARARLASGEVVSGVASSFINTRLAIGDTIELRAPAGTFVMPTRTARPLVLLAGGIGITPFINLLESLVGQQDPPRMLLLYANQNGTTHAFRDPLRELEALIPALKVINFYDAPADGDILGSDFQVHGRVTAAAVPDALLASRPLVYMCGPDAMMTAFAAGLAARGVPRFDIQKEVFRSPTVRRIEASQAFQVQFRRSDITLSWRSEHGPLLGFAEALGIRLPSGCRVGQCESCAVRIVSGTVHHLHGEAPDDPGVCLACQAVPASDLVIDA

SEQ ID NO: 211 - protein, 371 aa, Methylobacillus flagellatus KT
MLSAHPELKNLFNMGNQANGIQQQSLAAAVFAYAANIDNPAALAPVVKRIVHKHAAVGIKPEHYPIVGQYLIGAIKQVLGEAATDELLAAWGEAYWSLANLLIEEEKSLYASTASTAGALMTLKVARKVFESEHIVSFYLQHPDGRKPGDFLPGQYISVEMQFEQNKRRQLRQYSLSDSSTAPWWRISVKREQEAEKPEGLLSNWLHDEVKVGDLIHATPAFGDFVLDPVISDQPLLLISAGIGITPMLSMLNSVRDLAPQRPVFFAHAARSPAWQSHSLDLQEARYRMTNLQTALFYESLEGAHGSIGGVYQGRMDITDLWPAVLHHADIYLCGPLGFMQAQREQLLQAGVAASHIKREVFGPDLLDHLL

SEQ ID NO: 212 - protein, 406 aa, Ralstonia metallidurans CH34
MLSAASRPYIDASVPVLREHGLAITTHFYREMFAARPELKRIFNMGNQANGSQQQSLASAVFAYAANIDRADVLAPVVERIVHKHVAVGLTPAHYPIVGKYLLEAIAAVLGDAATPPLLAAWDEAYWLLAGELIAAEARLYERHGVAAGELLRVRVVNREQEGDQVVALTLAAEDGSPLRDFAPGQYISVEASFADGRRQLRQYSLSGERGLPTWRISVKREDGASDAPAGTVSNWLHENAQVGTTLHVSTPWGDFAPELDSRQPIVLMSAGIGVTPMVSVLRTLAHENPHRPVLFAHAARHGRQHAHRRDLAWARERMPNLRTHVSYETPQSVDASGRDYDHAGTMPVEALLKSGDNAAFNDARFYLCGPLGFMQEQRRALIASGVPVGHIHREVFGPDLLDDIL

SEQ ID NO: 213 - protein, 339 aa, Ralstonia metallidurans CH34
MEHTIALQFEDGVTRFITCGDNETLSDAAYRQQINIPLDCRDGACGTCRGLCESGHYDLPESSYIEDALTAEEAAKGYVLACKTRPRSDCVIRVPASSAACKTGVTRFEGAIAAVAPLSDSTIGFSIDLDDPAALSFLPGQYVNVEIPGSGLTRAYSFSSPPGASQAAFVVRNVPQGRMSGFLAGEAQTGQRMAFSGPFGSFYLRSVTRPVLFLAGGTGIAPFLSMLDVLAASGSTHPVRMVYGVTHDIDLVATERLEAAAASIDGFTYRTCIADAASTHERKGYVTTHVDPTWINHGDVDIYLCGPVAMVEAVRDWLRDAGITPANFYYEKFSASAEA

SEQ ID NO: 214 - protein, 393 aa, Burkholderia fungorum LB400
MLSAEHRAIVKATVPLLESGGEALTTHFYRILIGEHPEVRPMFNLANQASGAQPRALANSVLMYARHIDQLEQLGGLVSQIINKHVALNILPEHYPIVGQCLLRAIREVLGAEIATDAVIAAWAAAYRQLADLLIGLEEKIYAEREAAPGGWRGTRLFRVARKVRESDEITSFYLRPDDNGELLAFHPGQYIGVRLYIDGEEVRRNYSLSAMSNGCEYRISVKREANGKVSSHLHTHLNENDTIELFAPAGDFTLEPGDKPLVLISGGVGITPTLAMLQAALHTNRVVHFIHSARHGGVHAFRDTIEQLAARHPQLKRFYCYEQRRADDADADGIGYLDETRLDAWLPETRDVDVYFLGPIAFMKAVKKHLKAIGVPESQSRYEFFGPAAALE

SEQ ID NO: 215 - protein, 668 aa, Burkholderia fungorum LB400
MGVAERMQEVGRRVIRRLMPDQHRAFFPQLPFVALGAVDHEGDVWATLVAGKPGFLHAPTARTLRVDLVRDPHDPASAGLDDGEAVGLLGIELHTRRRNRLNGTVSHSAGAGFNVDVTQSFGNCPQYIQMRDAEFVRDPASPPPVEAVQLEHLSERARTMIDTADTFFVASYVDDPAGRQVDVSHRGGKAGFVRLSEDGVLTIPDFAGNLFFATLGNFVINPRAGLVFADFESGDLLQLTGEAQVDLDSPEIAAFQGAERLWRFKPRRIVYRAGALPLRWKLQANGWSPNSLMTGSWDEVASRVKAQALADAWRPFKVTQVVDESSVIRSFYLEPLDGAGLIPHAAAQHLPIRVTLPGCTKPVIRTYTLSTAPADGSYRISVKRQGLVSAHLHDTLRVGSVIEARAPAGQFTIDAAARRSAVLLAAGVGVTPMLAMLRHIVYEGLRTRRVRPTWFFHSARTLAERAFTKEIDQLAASAGGAVRVVRTLTDTEGAQMGKDFDASGRLDVELLRATLPFNDYDFYLCGPAGFMQSLYDGLRELNVADNRIHAEAFGPAGLHRRADAGADAGLAHLPADKPVPVAFVKSGKEARWNPDSGSLLDLAESRGLSPEFGCRGGSCGTCRTRVLEGAVAYPVAPEFKVASDEALICCAVPAQAGTSGAERLLLDL

SEQ ID NO: 216 - protein, 403 aa, Sinorhizobium meliloti 1021
MLTQKTKDIVKATAPVLAQHGYAIIQHFYKRMFQAHPELKNIFNMAHQERGEQQQALARAVYAYAANIENPESLSAVLKDIAHKHASLGVRPEQYPIVGEHLLASIKEVLGDAATDEIISAWAQAYGNLADILAGMESELYERSEERAGGWAGWRRFIVREKNPESDVITSFVLEPADGGPVADFEPGQYTSVAVQVPKLGYQQIRQYSLSDSPNGRSYRISVKREDGGLGTPGYVSSLLHDEINVGDELKLAAPYGNFYIDVSATTPIVLISGGVGLTPMVSMLKKALQTPPRKVVFVHGARNSAVHAMRDRLKEASRTYPDFKLFIFYDEPLPTDIEGRDYDFAGLVDVEKVKDSILLDDADYYICGPVPFMRMQHDKLLGLGITEARIHYEVFGPDLFAE

SEQ ID NO: 217 - protein, 336 aa, Pseudomonas putida
MSYQIALNFEDGVTRFIEATGHETVADAAYRQGINIPLDCRDGACGTCKCKAESGRYDLGDNFIEDALNEDEIAEGYVLTCQMRAESDCVIRIPASSQLCKTEQASFEAAISDVRQLSASTIALSIKGEALSRLAFLPGQYVNLKVPGSEQSRAYSFSSLQKGGEVSFLIRNVPGGLMSSFLTNLAKAGDSMSLAGPLGSFYLRPIQRPLLLLAGGTGLAPFTAMLEKIAEQGSEHPLHLIYGVTNDFDLVELDRLQALAARIPNFTYSACVANPDSQYPQKGYVTQHIEPRHLNDGDVDLYLCGPPPMVEAVSQYVREQGITPANFYYEKFAAAA

SEQ ID NO: 218 - protein, 392 aa, Pseudomonas stutzeri
MLCAEQIALIKATVPLLESGGEALTTHFYKLWLDEHPEVQPLFNQAHQASGEQPRALANGVLMYAKHIDRLEALGPLVGQIINKHVALQVLPEHYPLVGSCLLRAIREVLGEEIATEAVIDAWGAAYQQLADILIGQEESLYRAKAAAEGGWRGARPFRIIRKVAESEEITSFHLQPEDGGPLMDFLPGQYIGLRLEVDGQEVRRNYSLSAASNGSEYRISVKREPGGVASNALHAMPEGAVLELFGPAGEFTLEPGNKPLVLISGGVGITPTLAMLEQALASTRPVHFIHCARNAGVHAFRCSVDTLAERHAQLKRFYCYEEHDGAGAAPDAVGRLTEQQLGEWLPEDRNVDAYFLGPKPFMAAVRRQLKSLGVPEQQTRYEFFGPASALD

SEQ ID NO: 219 - protein, 393 aa, Azotobacter vinelandii
MLTEQQRAIVKATVPLLETGGEALTSHFYRIMLAEHPEVRPLFNQAHQASGEQPRALANAVLMYARHIDRLEALGPLVAQIVNKHVSLQVLPEHYPIVGACLLRAIREVLGAETATDAVLDAWGAAYGMLAELLIGAEEAAYAAGAAVPGGWRGARAFRVARRVVESEEIVSLHLRPEDGGALPAFRPGQYIGLRLVLDGEEVRRNYSLSAAPNGEEYRISVKRHATGRVSRHLHEQVREGDRLELFPPAGEFVLNDSDKPLVLIGAGVGVTPLLAMLEAALPGGRPIRFIHCARHAGVQAFRQQVEALAGRHPQLEAFFCYSAPRAGDRADANGRLDAQRLAAWLPAERDLDAYFLGPKSFMAQVKRQLRELGVPQEQCHYEFFGPAQALEA

SEQ ID NO: 220 - protein, 336 aa, Azotobacter vinelandii
MSYKVALNFEDGVTRFIEVDSGETVADASYRQGINIPLDCRDGACGACKCLAESGRYDLGENYIEDALSEEEKAAGLVLTCQMRPESDCVLRIPASSEVCKTEQASYAAVISDVRALSPSVISLSIKGDSLVRLSFLPGQYVNLEVPGSDQTRAYSFSSMPHDGEVSFLIRNVPGGLMSGYLSQQARAGDPMTLTGPLGSFYLREIRRPLLMLAGGTGLAPFTAMLEKIAEGGSAHPVHLIYGVTHDADLVEMDRLQEFAARIPGFTFTACVASPESSYPHKGYVTQHIEPRHLNDGEVDIYLCGPPPMVEAVNKFLREQGIQPANFHYEKFAASV

SEQ ID NO: 221 - protein, 407 aa, Azotobacter vinelandii
MSNEIFLAIGMFTAIVLALVVIILAARARLVSSGDVSIEINGERSITVPAGGKLLQTLAANNIFLSSACGGGGTCAQCKCVVESGGGEMLPTEESHFTRRQAKEGWRLSCQTPVKQDMRIEVPEEVFGVKKWECTVESNPNVATFIKELTLRLPEGESVDFRAGGYVQLECPPHVVHYKDFDIQEEYRGDWDKFNMWRFVSKVDETTIRAYSMANYPEEKGIVKFNIRIASPPPNRDDIPPGKMSSFVFNLKPGDKVTVYGPFGEFFARDTDAEMVFIGGGAGMAPMRSHIFDQLKRLKSKRKMSFWYGARSLREAFYVEEYDQLQAENPNFRWHLALSDPQPEDNWTGLTGFIHNVLYENCLKDHPAPEDCEFYMCGPPMMNAAVIKMLLDLGVERENILLDDFGG

SEQ ID NO: 222 - protein, 403 aa, Sinorhizobium meliloti
MLTQKTKDIVKATAPVLAQHGYAIIQHFYKRMFQAHPELKDIFNMAHQERGEQQQALARAVYAYAANIENPESLSAVLKDIAHKHASIGVRPEQYPIVGEHLLASIKEVLGDAATDEIISAWAQAYGNLADILAGMESELYGRSEERAGGWAGWRRFIVREKNPESDVITSFVLEPADGGPVADFEPGQYTSVAVQVPKLGYQQIRQYSLSDSPNGRSYRISVKREDGGLGTPGYVSSLLHDEINVGDEPKLAAPYGNFYIDVSATTPIVLISGGVGLTPMVSMLKKALQTPPRKVVFVHGARNSAVHAMRDRLKEASRTYPDFKLFIFYDEPLPTDIEGRDYDFAGLVDVENVKDSILLDDADYYICGPVPFMRMQHDKLLGLGITEARIHYEVFGPDLFAE

SEQ ID NO: 223 - protein, 338 aa, Acinetobacter radioresistens
MSNHNVALQFEDGVTRFISVAQGETLSDAAYRQKINIPLDCRDGACGTCRAFCESGSYDMPEENYIEDALTPEEAEEGYILACQCRPTSDAVFQIQASSDVCKTEIHKFQGTLSRVENLSDSTITFDIELDEGQPDIHFLAGQYVNVEIPGTTETRSYSFSSKPGNRLTGFVVRNVPNGKMSEFLSKTVKPGDKMSFTGPFGSFYLRHINRPVLMLAGGTGIAPFMSMLQVLQEKGCEQPVRLVFGVTNDFDLVALEKLDELQEKFPWFEYCTVVANPESLHERKGYVSNHIDHDWLNSGDVDIYLCGPVPMVEAVRGWLDAEGVKPANFLFEKFSAN

SEQ ID NO: 224 - protein, 348 aa, Methylococcus capsulatus
MQRVHTITAVTEDGESLRFECRSDEDVITAALRQNIFLMSSCREGGCATCKALCSEGDYDLKGCSVQALPPEEEEEGLVLLCRTYPKTDLEIELPYTHCRISFGEVGSFEAEVVGLNWVSSNTVQFLLQKRPDECGNRGVKFEPGQFMDLTIPGTDVSRSYSPANLPNPEGRLEFLIRVLPEGRFSDYLRNDARVGQVLSVKGPLGVFGLKERGMAPRYFVAGGTGLAPVVSMVRQMQEWTAPNETRIYFGVNHEPELFYIDELKSLERSMRNLTVKACVWHPSGDWEGEQGSPIDALREDLESSDANPDIYLCGPPGMIDAACELVRSRGIPGEQVFFEKFLPSGAA

SEQ ID NO: 225 - protein, 250 aa, Methylococcus capsulatus
CRISFGEVGSFEAEVVGLNWVSSNTVQFLLQKRPDECGNRGVKFEPGQFMDLTIPGTDVSRSYSPANLPNPEGRLEFLIRVLPEGRFSDYLRNDARVGQVLSVKGPLGVFGLKERGMAPRYFVAGGTGLAPVVSMVRQMQEWTAPNETRIYFGVNTEPELFYIDELKSLERSMRNLTVKACVWHPSGDWEGEQGSPIDALREDLESSDANPDIYLCGPPGMIDAACELVRSRGIPGEQVFFEKFLPSGAA

SEQ ID NO: 226 - protein, 324 aa, Sphingobium chlorophenolicum
MTNPVSTIDMTVTQITRVAKDINSYELRPEPGVILPEFTAGAHIGVSLPNGIQRSYSLVNPQGERDRYVITVNLDRNSRGGSRYLHEQLRVGQRLSIVPPANNFALVETAPHSVLFAGGIGITPIWSMIQRLRELGSTWELHYACRGKDFVAYRQELEQAAAEAGARFHLHLDEEADGKFLDLAGPVAQAGQDSIFYCCGPEAMLQAYKAATADLPSERVRFEHFGAALTGEPADDVFTVVLARRSGQEFTVEPGMTILETLLQNGISRNYSCTQGVCGTCETKVLEGEPDHRDWVLSDEKKASNSTMLICCSLSKSPRLVLDI

SEQ ID NO: 227 - protein, 427 aa, Schizosaccharomyces pombe
MSSVEVNRENADVANTNRQANLAEGYEIKELNESQKQYIRSSIPILESSGVNLTKAFYQKMLGNYPEVLPYFNKAHQISLSQPRILAFALLNYAKNIDDLTSLSAFMDQIVVKHVGLQIKAEHYPIVGHCLLSTMQELLPSDVATPAFLEAWTTAYGNLAKILIDSEKKVYQSQPWNGFVEFKVTELINESSDVKSVYLGPKDPAFRISHAHPGQYVSVLWEIPGLSHKTLREYSLSNRVDTCRNQFRISVRRVAGGVVSNFVHDNLKVGDIVGVSPPAGNFVYKRSEENVNRPLLCFAGGIGITPLIPIIETALLDGRKVNFCYSSRNYVSRPFKQWLEQLKLKYKENLKLKEFFSEESSVTKEQIVDEVMTRIINEEDLEKLDLSECDIYMLGPNNYMRFVKQELVKLGVEPNKVQSEFFGPYIP

SEQ ID NO: 228 - protein, 388 aa, Pichia norvegensis
MSAAKQLFKIVPLTPTEINFLQSLAPVVKEHGVTVTSTMYKYMFQTYPEVRSYFNMTNQKTGRQPKVLAFSLYQYILHLNDLTPISGFVNQIVLKHCGLGIKPDQYPVVGESLVQAFKMVLGEAADEHFVEVFKKAYGNLAQTLIDAEASVYKTLAWEEFKDFRVTKLVKEAEDVTSVYLTPVDGFKLKPIIPGEYISFRWDIHNPDITDIQPREYSISQDVKENEYRISVRDIGIVSDYINKKLQVGDIVPVHAPVGTMKYDSISKKGKVAVLAGGIGITPMIPIIEHALKDGKDVELYYSNRSYQSEPFREFFSNLEKENNGKFKLNNYISAENQKLQVKDLEHINPDEYDVYLLGPVAYMHEFKTYLVGKGVSDLKMEFFGPTDP

SEQ ID NO: 229 - protein, 399 aa, Saccharomyces cerevisiae
MLAEKTRSIIKATVPVLEQQGTVITRTFYKNMLTEHTELLNIFNRTNQKVGAQPNALATTVLAAAKNIDDLSVLMDHVKQIGHKHRALQIKPEHYPIVGEYLLKAIKEVLGDAATPEIINAWGEAYQAIADIFITVEKKMYEEALWPGWKPFEITAKEYVASDIVEFTVKPKFGSGIELESLPITPGQYITVNTHPIRQENQYDALRHYSLCSASTKNGLRFAVKMEAARENFPAGLVSEYLHKDAKVGDEIKLSAPAGDFAINKELIHQNEVPLVLLSSGVGVTPLLAMLEEQVKCNPNRPIYWIQSSYDEKTQAFKKHVDELLAECANVDKIIVHTDTEPLIDAAFLKEKSPAHADVYTCGSVAFMQAMIGHLKELEHRDDMIHYEPFGPKMSTVQV

SEQ ID NO: 230 - protein, 399 aa, Saccharomyces cerevisiae [sequence omitted]

SEQ ID NO: 231 - protein, 413 aa, Aspergillus fumigatus
MPLTPEQVQIIKATVPVLAEHGTTITTVFYKNMLTAHPELNNVFNTTHQVTGHQARALAGALFAYASNIDNLGALGPAVELMCHKHASLYIKPDDYKIVGKFLLEAMGQVLGDALTPEILDAWATAYWQLADIMIGREAQLYEQAEGWTDFRDFVVALKVPESSEITSFYLKPADGKPLPAFQPGQYISVQVHVPELNYLQARQYSLSDMPRSDYYRISVKKESGLNPAEPGAKAHPGHVSNILHASVNEGDTIKVSHPFGDFFLSDAKAAHPVVLLSAGVGLTPMTSILNTLTSQAPERKVSFIHGARNARARAFKNHITSLEQKLPNLKSTFFTSHPTEEDKEGDDYQFRGRVDLSQLDSNRDLFLDDATTEYYVCGPDTFMTDMLNVLKSKGVSEDRVKLELFGTGGVPH

SEQ ID NO: 232 - protein, 418 aa, Neurospora crassa
MTLTDAQISIVKSTAPVLKQHGEAITTVFYNDLITENPSLKNIFSLTSQATGAQPRALAHAVLAYATYIDNLSALSEAVARIAHKHVSLQVEPAQYAIVGQYLIQAIGKVLGDAATPEIVDAWTAAYGVLANVFIGVEGGMYEENEKKDHWKGWRKFRIARKVEESSSISSFYLRPVDGATLPKYLPGQYVSVQVLVSQLGYLQSRQYSLSEAPKEGGMEEYRISVKREEGETGAPGLVSNLLHGMQEGAEVEVSHPQGEFFLDPADASKEGVPAVLISVGVGATPMMAILKSLLQENVKRRPVSWIHASKSSSTQPFGEEVRRIVKENPEQVSAHVFLKTVAGTDQAGVHYDFADTRMDLTKLDGERDLHLADKRTEYYICGPETFMVETRKVLVGLGVDKSKVHLELFATGFVADE

SEQ ID NO: 233 - protein, 537 aa, Neurospora crassa
MALTYQQSKLVRDTIPALKEHGERITSIFYKTMLTDHPELNNYFNSVNQKNGRQPRALTAVILGFASNINHLSELVPKFERMCNKHCSLGIQPEHYEVVGKYLIQAFGEVLGPAMTPEVQTAWTKAYWMLAKMLIGREAQLYRDFESWPSWRPFKIDRIVNECDDLYTFYLVPQDGKRLPKFLPGQYVSVQIQVPGGNLQSRQYSLSEAWREDYYRITIRRDEGTVYSNSVSKSFFNPGIVSNYLIDQTTVGSILQVSHPAGEFFLDVHNTSTVPLVLISAGVGVTPMVSIANTVMESQPSRQIAWIHGCRKHIPFEDHIKTLRKKNSNFQTKIFKTVINSTDRPGETYDYNERMDLAKLKPEELHLQHGGTEYFICGPEQFMVNQKLYLMQQGVSASRIKCEIFTTGDLKLGLIIETIDQEEEAGDEKRVTHISREGGGGWENVAPDPRKARRSPSLSTKLPKRRNHAAVSGLSTGSGTQKLAPTLLNPSSTRTRRDMTIPPPTTTTAMPGMEEEEEEERREEERRYRWREASALG

SEQ ID NO: 234 - protein, 343 aa, Methylocystis sp. M
MYQIVIETEDGETCSFECGPSEDVISAGLRQSVILLASCRAGACATCKADCTDGDYELIDVKVQALPPDEEEDGKVLLCRTFPRSDLHVVVPYTYDRISFQAIQTNWLAEITECDRVSSNVVRLVLQPLTADGAAPISLNFLPGQFVDIEIPGTHTRRSYSMASVAEDGRLEFFIRLLPDGAFSNYLRTQARVGQRVALRGPAGSFSLHKSERPRFFVAGGTGLSPVLSMIRQLHKESDPQPATLFFGVTNYEELFYVDELKALQHAMPSLDVQIAVVNVSEGNGVAKGTVIDLLQDELGRRAEKPDIYLCGPPGMIDAAFAAASSAGVPKEQVYLEKFLASG

SEQ ID NO: 235 - protein, 341 aa, Pseudomonas resinovorans
MSHKVAFSFADGKTLFFPVQSHEILLDAALRNGINIPLDCREGVCGTCQGRCESGQYSQDYVDDEALSAEDLRQRKMLTCQTRVSSDAAFYFDFASSLCNAPGPGRLKGIVRAVEQVSPNTAILHLDAGADGQQLDFLPGQYARLQIPGTHGQRSYSFANRPNSGNQLQFLIRLLPDGLMSNYIRERSLIGDEILLEAPLGAFYLRHVDKPLVFVAGGTGLSAFLGMLDEIAERGGCGHPVHLYYGVRNAADLCETQRIAAYAERIPGFRFTPVISDPSPDWHGKRGYITEHFDLAEFRDQALDMYLCGPPPMVESIKQWLDTQALDQTRLYYEKFTQSNT

SEQ ID NO: 236 - protein, 342 aa, Pseudomonas resinovorans
MSHKVAFSFADGKTLFFPVQSHEILLDAALRNGINIPLDCREGVCGTCQGRCESGQYSQDYVDDEALSAEDLRQRKMLTCQTRVSSDAAFYFDFASSLCNAPGPGRLKGIVRAVEQVSPNTAILHLDAGADGQQLDFLPGQYARLQIPGTHGQRSYSFANRPNSGNQLQFLIRLLPDGLMSNYIRERSLIGDEILLEAPLGAFYLRHVDKPLVFVAGGKPLSAFLGMLDEIAERGGCGHPVHLYYGVRNAADLCETQRIAAYAERIPGFRLHPGSSATPARTWHGKRGYITEHFDLAEFRDQALDMYLCGPPPMVESIKQWLDTQALDQTRLYYEKFTQSNT

SEQ ID NO: 237 - protein, 415 aa, Fusarium oxysporum
MALTAAQVAIVKSTAPILKEHGKTITTTFYRNMLGAHPELKNYFSLRNQQTGAQQAALANSVLAYATYIDDLGKLSHAVERIAHKHVSLFIKPEHYPIVGTHLIGAIGEVLGSALTTEIKDAWVAAYGQLADIFIQREGQMYEAAGEWNSWRKFKIVKKEAENDSVTSFYLEPTDGKPLPKFLPGQYVSVQIPIPELDGLLQSRQFSLSEAPGTNHYRISVKLQGPTEEPAVEDLAAGKIAGLLSTRLHNRYNVGDEVELSPPAGEFSLDPADTSAAKKPLVLLSAGVGATPLVSILDSVLQSPTASRPITWIHGARYSGSTCFVPHVLDSAKKHENITAKIFLEDVKEGDQYDFKGEIDLAKLQKEQLLQLDNADAEYYICGPEDWMVNVRAFLEENGVPRERQHLELFKTGDI

SEQ ID NO: 238 - protein, 395 aa, Erwinia chrysanthemi
MLDQQTIATIKSTIPLLAETGPALTAHFYQRMFHHNPELKDIFNMSNQRNGDQREALFNAICAYATHIENLPALLPAVERIAQKHASFNIQPEQYQIVGTHLLATLEEMFQPGQAVLDAWGKRYGVLANVFIQRESDIYQQSAGQNGGWHGIRPFRIVAKQPQSSLITSFTLEPVDGGPIAAFRPGQYLAVYIRDKRFEYQEIRQYSLTNEPNGRYYRIAVKRETMGSVSGYLHDVAREGDVIELAAPHGDFYLEVTPETPVALISAGVGQTPMLSMLHSLKNQQHQADIFWLHAAENTEVHAFADEIADVAATLPQLQSYVWYREASSEAARSAHAFHGLMALKDLPTPLPMTNLHCYLCGPVAFMQFAARQLLELGITESQIHYECFGPHKVI

SEQ ID NO: 239 - protein, 396 aa, Salmonella typhimurium
MLDAQTIATVKATIPLLVETGPKLTAHFYDRMFTHNPELKEIFNMSNQRNGDQREALFNAIAAYASNIENLPALLPAVEKIAQKHTSFQIKPEQYNIVGTHLLATLDEMFNPGQEVLDAWGKAYGVLANVFIHREAEIYHENASKDGGWEGTRPFRIVAKTPRSALITSFEFEPVDGGTVAEYRPGQYLGVWLKPEGFAHQVFRQYSLTRKPDGKGYRIAVKREDGGQVSNWLHHHASVGDVVHLAAPAGDFFMNVAADTPVSLISAGVGQTPMLAMLDTLAKEQHTAQVNWFHAAENGDVHAFADEVSELGRTLPRFTAHTWYREPTEADRAQRLFDSEGLMDLSKLEAAISDPAMQFYLCGPVGFMQFAAKQLVSLGVNNENIHYECFGPHKVL

SEQ ID NO: 240 - protein, 146 aa, Vitreoscilla stercoraria
MLDQQTVDTSKATVPVLKEHGVTITTTFYQNLFAKHPEVRPLFDMGRQASLEQPKALAMTVGAAAQNIENLPAILPAVQKIAVKHCQAGVAARHYPIVGQELLGAIKELLGDAATDDILDAWGKAYGVIADVFIQVEADLYAQDAE

SEQ ID NO: 241 - protein, 254 aa, Acinetobacter sp. ADP1
MTPQQIELVKSTVPVLREHGVTLTSYFYNRMLNNHPELKNVFNLDHQSTGRQPRALAAAVLAYAEHIEQPEKLAKAVERITTKHVSLNIQPEQYAIVGENLLHSISEVLNVPFESELIEAWKQAYLQLADILIEVEKEKYHQLAKQDGGWTGWRSFKIIAIQEQYEGKCFKISATDQQAILAATLGEYISVKVHVPEKELDQPQQFNLNTTQADDHYEFVVKPEPAHSDYDVANILLNHYSLGDEVMVSAPIRN

SEQ ID NO: 242 - protein, 353 aa, Acinetobacter sp. ADP1
MQAIQKRTTRLRSLTKSVFEPHATDFWLQKINPIWSTHLALAKIVDKKQVANDTVSLTLQPNRHVNLGRAGQHHPVKVKIAGRIYERSYSLTERHGQLILTVKKVAEGKVSAWLVDHSQIGDIIELGQPFGEMQLQDQQRLVLLAAGSGITPMLSLVEALKHQQALNTTQVQLLYWVKHHEDAAYAQWFEALAKQFPLFQFQIFYTQDQEHDGRLNVTHLAAIDDLDQSTVYACGPSGFVAKAEELFAQAQVFMSEAFSLSTVSEDETGFVNVTLSKSNKTVAIPKGQSILAGLEQANVKLTYGCRMGICNKCACQKAQGSTRNLLNASENSEPNNLLKICVNSAKSDLVIDL

SEQ ID NO: 243 - protein, 348 aa, Acinetobacter sp. ADP1
MSLYLNRIPAMSNHQVALQFEDGVTRFIRIAQGETLSDAAYRQQINIPMDCREGACGTCRAFCESGNYDMPEDNYIEDALTPEEAQQGYVLACQCRPTSDAVFQIQASSEVCKTKIHHFEGTLARVENLSDSTITFDIQLDDGQPDIHFLAGQYVNVTLPGTTETRSYSFSSQPGNRLTGFVVRNVPQGKMSEYLSVQAKAGDKMSFTGPFGSFYLRDVKRPVLMLAGGTGIAPFLSMLQVLEQKGSEHPVRLVFGVTQDCDLVALEQLDALQQKLPWFEYRTVVAHAESQHERKGYVTGHIEYDWLNGGEVDVYLCGPVPMVEAVRSWLDTQGIQPANFLFEKFSAN

SEQ ID NO: 244 - protein, 338 aa, Acinetobacter sp. ADP1
MSNHQVALQFEDGVTRFICIAQGETLSDAAYRQQINIPMDCREGECGTCRAFCESGNYDMPEDNYIEDALTPEEAQQGYVLACQCRPTSDAVFQIQASSEVCKTKIHHFEGTLARVENLSDSTITFDIQLDDGQPDIHFLAGQYVNVTLPGTTETRSYSFSSQPGNRLTGFVVRNVPQGKMSEYLSVQAKAGDKMSFTGPFGSFYLRDVKRPVLMLAGGTGIAPFLSMLQVLEQKGSEHPVRLVFGVTQDCDLVALEQLDALQQKLPWFEYRTVVAHAESQHERKGYVTGHIEYDWLNGGEVDVYLCGPVPMVEAVRSWLDTQGIQPANFLFEKFSAN

SEQ ID NO: 245 - protein, 439 aa, Nostoc punctiforme PCC 73102
MLESLGRIKNPLVRSIAAAATVSSVITLSAAVVIGVSNAKAKSAYQFGVYSSLFGTASGAVFGLVYTNKASGNKSTPDLKTLDSHVWQDWRNFVVVRKVKESEEITSFYLQPEDKGEITNFQPGQFLTIKLDIPGQDKPVIRTYSLSDYPENCEYYRLSIKREPAPNGLDVMPGIASNFMHDRIQEGSVILAKPPNGKFVLDVQKSIPAVLISNGVGITPMISMAKACSLLNPTRPIWFVHGARDGKFHAFRDEVREISRQNHNLNVHFRYSRPTPEDRGKYHSVGYVDAALIQELVRQEAEYFLCGSPSFMQSIMQGLKESGVPDSRVFFESFGKPMKSVSEKQTQTVTGDDKFAEIVFAKSGKTLTWQPSDGTILEFAEANDINPPFSCRVGVCGTCMCKIREGVVAYQEEPTATTDQGSVLICISQPGTSKLVLDI

SEQ ID NO: 246 - protein, 126 aa, Nostoc punctiforme PCC 73102
MYEIMFQNHPEVKEQFSMAAQADGSQPARLATAVYSYANQIDNLPALKSMVEKIAHRHVQTHVTPEQYPIVGESLLQAMKDVLGEAATEEVMAAWTEAYQALSEVFIHREHDIYVGEDKKAQLLHS

SEQ ID NO: 247 - protein, 115 aa, Vibrio cholerae
MQAILHTLAKQNKSGVTYLYACNSAKEHIFAQEAAQLIAQQGWMQQVWYRDESADDVLQGEMQLAELILPIEDGDFYLCGPIGFMQYVVKQLLALGEDKARIHYEVFGPHAQLAA

SEQ ID NO: 248 - protein, 411 aa, Bacillus sp. KSM-K16
MSTVMLKEESKRLVKATVPILAAHGETITKHFYKRMFHHHPELLNVFNRTNQKIGRQPQALANSIYAAAQHIDNLEAILPVVKRIAHKHRSLNIKPEQYPIVGENLLAAMKEVLGEAASDDVIEAWREAYEIIAGVFIEVEKQMYDQAGKAPGGWSGFRSFVVEKKKQESKAITSFYLKPKDGNEIASYQPGQYMTVKVNIPGDTYTHMRQYSLSDAPGKGYYRISVKREEGNTECPPGVVSNYLHQHIREGDVLEMTAPAGDFTLKQGEERPIVLISGGVGITPLMSMFNTLMQQGTKQKVTFIHAAIDGTYHAMHDHVAQTASQKENVHYAVCYERPTSEDQMNPYMKKEGYIDEQFLRSMIEDHHADFYFCGPIPFMKTVYHILNNWGVPEEQIHYEFFGPAGTLASS

SEQ ID NO: 249 - protein, 394 aa, Vibrio parahaemolyticus
MLSNQTIEIVKATAPLIAETGPKLTAHFYDRMFTHNPELKDIFNMSNQRNGDQREALFNAICAYAANIENLPALLGAVEKIAHKHTSFLITKDQYQIVGKHLIATIDELFNPGQEVLGAWAEAYGVLANVFIQREEQIYQANASQEGGWRGLREFELVGKQLESEHICSFVFKPTDGSKVTKYKPGQYLGIYINSDKFENQEIRQYSLSSSVQENTYRISVKREQGGKVSNYLHDELNIGDKVKLAAPAGDFFMDVDTNTPVVLISAGVGLTPTLSMLESLTEHHAPVTWVHATENSKHHAFKEHVNQLVTAKENMNALIWYNQPTAEDKIGEDFHFTGFVNLHEIEAALKQDNVQVYFCGPVGFMQHVAKQLQELGVPQEQFHYECFGPHKVV

SEQ ID NO: 250 - protein, 248 aa, Sphingomonas sp. UG30
MTSPASTIDMLVTQITRVAKDINSYELRPEPGVILPEFTAGAHIGVSLPNGILRSYSLVNPQGERDRYVITVNLDRNSRGGSRYLHEQLRVGQRLSIVPPANNFNLVETARHSVLFAGGIGITPIWSMIQRLRELGSSWELHYACRGKEFVAFRQELEQAASEAGATFNLHLDEEANGGFLDLSGPVARAGEDSIFYCCGPEAMLQAYKAASADLPSERVRFEHFGAAPSSAPADDVFTVLARSGQEF

SEQ ID NO: 251 - protein, 363 aa, Mycobacterium tuberculosis CDC1551
MAERTVPETSWASRPADLYGRRSRDRFFTALWGVRALLGGLGAASRWEPSRVQPVRRTNPAVVTKRELVAPDVVALTLADPGGGLLPAWSPGGHIDVQLPSGRRRQYSLCGVPGRRTDYRIAIRRIADGGGGSIEMHEAFDVGDTCEFEGPRNAFHLGLAERDVLFVIGGIGVTPILPMIRAAEQRGIDWRAIYAGRGREYMPFLDEVVAVAPGRVTVWADDEHGRFASVDELLAGAGPTTAVYVCGPPGMLEAVRVARNQHADAPLHYERFSPPPVVDGVPFELELARSRRVLRVPANRSALDVMLDWDPTTAYSCQQGFCGTCKVRVLAGQVDRRGRIIEGDNEMLVCVSRAVSGRVVIDA

SEQ ID NO: 252 - protein, 396 aa, Escherichia coli K12 [sequence omitted]

SEQ ID NO: 253 - protein, 396 aa, Escherichia coli O157:H7
MLDAQTIATVKATIPLLVETGPKLTAHFYDRMFTHNPELKEIFNMSNQRNGDQREALFNAIAAYASNIENLPALLPAVEKIAQKHTSFQIKPEQYNIVGEHLLATLDEMFSPGQEVLDAWGKAYGVLANVFINREAEIYNENASKAGGWEGTRDFRIVAKTPRSALITSFELEPVDGGAVAEYRPGQYLGVWLKPEGFPHQEIRQYSLTRKPDGKGYRIAVKREEGGQVSNWLHNHANVGDVVKLVAPAGDFFMAVADDTPVTLISAGVGQTPMLAMLDTLAKAGHTAQVNWFHAAENGDVHAFADEVKELGQSLPRFTAHTWYRQPSEADRAKGQFDSEGLMDLSKLEGAFSDPTMQFYLCGPVGFMQFAAKQLVDLGVKQENIHYECFGPHKVL

SEQ ID NO: 254 - protein, 381 aa, Staphylococcus aureus subsp. aureus COL
MLTEQEKDIIKQTVPLLKEKGTEITSIFYPKMFKAHPELLNMFNQTNQKRGMQSSALAQAVMAAAVNIDNLSVIKPVIMPVAYKHCALQVYAEHYPIVGKNLLKAIQDVTGLEENDPVIQAWAKAYGVIADVFIQIEKEIYDQMMWIGFKPFKITNIKQESEDIKSFTVETEEYDFSEFTPGQYITVDVSSDKLPYRAKRHYSIVSGEKNHLTFGVKRDVTTEHEGEVSTILHDEIKEGDMINLAAPVGGFVLENTTEPQLFLGSGIGVTPLVAMYEAASAKGLDTQMVQVAENEQHLPFKDNFNSIASHHDNAKLYTHLKDKQGYIGAEELQVFLANKPEIYICGGTKFLQSMIEALKSLNYDMDRVHYETFIPRLSVAV

SEQ ID NO: 255 - protein, 396 aa, Salmonella typhimurium LT2
MLDAQTIATVKATIPLLVETGPKLTAHFYDRMFTHNPELKEIFNMSNQRNGDQREALFNAIAAYASNIENLPALLPAVEKIAQKHTSFQIKPEQYNIVGTHLLATLDEMFNPGQEVLDAWGKAYGVLANVFIHREAEIYHENASKDGGWEGTRPFRIVAKTPRSALITSFEFEPVDGGTVAEYRPGQYLGVWLKPEGFAHQEIRQYSLTRKPDGKGYRIAVKREDGGQVSNWLHHHASVGDGVHLAAPAGDFFMNVAADTPVSLISAGVGQTPMLAMLDTLAKEQHTAQVNWFHAAENGDVHAFADEVSELGRTLPRFTAHTWYREPTESDRAQRLFDSEGLMDLSKLEAAISDPAMQFYLCGPVGFMQFAAKQLVSLGVNNENIHYECFGPHKVL

SEQ ID NO: 256 - protein, 396 aa, Xenorhabdus nematophila
MLDSQVIATVKSTIPLIVSTGPKLTAHFYERMFKHNPELKDIFNMSNQLNGAQREALFNALCAYASNIDNLQALLPAVEKIAHKHTSLNIQPEHYQIVGTHLLATLDEMFHPGDEVLNAWGKAYEVLADVFINREEDIYQRGESEEGGWRGLRQFRVNKKQPQSDVITSFEFVPADGGKVIDYKAGQYLGIYLDTPVFENREIRQYSLTTAPNNHSYQIAIKREAQGKVSNYMHDNVQEGDTILLAPPRGDFFLDVQSDTPVTLISAGVGLTPMMSMLQHLHNQHHVGTVNWFHATEHGGYHAFADKVNTITQSMTNLHTQVWYREPRNEDQQGADYQHMGLMDLSVVKDSITEEGMQFYFCGPVVFMQYIAQQLLAIGIDKQHIHYECFGPHKVL

SEQ ID NO: 257 - DNA, 8777 bp, Artificial
  the full length sequence for pMON69471
ggcgcgcctgcggccgcctcgaggtcattcatatgcttgagaagagagtcgggatagtccaaaataaaacaaaggtaagattacctggtcaaaagtgaaaacatcagttaaaaggtggtataaagtaaaatatcggtaataaaaggtggcccaaagtgaaatttactcttttctactattataaaaattgaggatgtttttgtcggtactttgatacgtcatttttgtatgaattggtttttaagtttattcgcttttggaaatgcatatctgtatttgagtcgggttttaagttcgtttgcttttgtaaatacagagggatttgtataagaaatatctttaaaaaaacccatatgctaatttgacataatttttgagaaaaatatatattcaggcgaattctcacaatgaacaataataagattaaaatagctttcccccgttgcagcgcatgggtattttttctagtaaaaataaaagataaacttagactcaaaacatttacaaaaacaacccctaaagttcctaaagcccaaagtgctatccacgatccattagcaaggcccagcccaacccaacccaacccaacccaccccagtccagccaactggacaatagtctccacccccggcactatcaccgtgagttgtccgcaccaccgcacgtctcgcagccaaaaaaaaaaaaagaaagaaaaaaaagaaaaagaaaaacagcaggtgggtccgggtcgtgggggccggaaaagcgaggaggatcgcgagcagcgacgaggcccggccctccctccgcttccaaagaaacgccccccatcgccactatatacatacccccccctctcctcccatccccccaaccctaccaccaccaccaccaccacctcctcccccctcgctgccggacgacgagctcctcccccctccccctccgccgccgccggtaaccaccccgcccctctcctctttctttctccgttttttttttcgtctcggtctcgatctttggccttggtagtttgggtgggcgagagcggcttcgtcgcccagatcggtgcgcgggaggggcgggatctcgcggctggcgtctccgggcgtgagtcggcccggatcctcgcggggaatggggctctcggatgtagatctgatccgccgttgttgggggagatgatggggggtttaaaatttccgccatgctaaacaagatcaggaagaggggaaaagggcactatggtttatatttttatatatttctgctgcttcgtcaggcttagatgtgctagatctttctttcttctttttgtgggtagaatttgaatccctcagcattgttcatcggtagtttttcttttcatgatttgtgacaaatgcagcctcgtgcggagcttttttgtaggtagaccgcgggatatcacaagtttgtacaaaaaagcaggctcctgcaggaccatgcttgacgctcaaaccatcgctacagtaaaagccaccatccctttactggtggaaacggggccaaagttaaccgcccatttctacgaccgtatgtttactcataacccagaactcaaagaaatttttaacatgagtaaccagcgtaatggcgatcaacgtgaagccctgtttaacgctattgccgcctacgccagtaatattgaaaacctgcctgcgctgctgccagcggtagaaaaaatcgcgcagaagcacaccagcttccagatcaaaccggaacagtacaacatcgtcggtgaacacctgttggcaacgctggacgaaatgttcagcccggggcaggaagtgctggacgcgtggggtaaagcctatggtgtactggctaatgtatttatcaatcgcgaggcggaaatctataacgaaaacgccagcaaagccggtggttgggaaggtactcgcgatttccgcattgtggctaaaacaccgcgcagcgcgcttatcaccagcttcgaactggagccggtcgacggtggcgcagtggcagaataccgtccggggcaatatctcggcgtctggctgaagccggaaggtttcccacatcaggaaattcgtcagtactctttgactcgcaaaccggatggcaaaggctatcgtattgcggtgaaacgcgaagagggtgggcaggtatccaactggttgcacaatcacgccaatgttggcgatgtcgtgaaactggtcgctccggcaggtgatttctttatggctgtcgcagatgacacaccagtgacgttaatctctgccggtgttggtcaaacgccaatgctggcaatgctcgacacgctggcaaaagcaggccacacagcacaagtgaactggttccatgcggcagaaaatggcgatgttcacgcctttgccgatgaagttaaggaactggggcagtcactgccgcgctttaccgcgcacacctggtatcgtcagccgagcgaagccgatcgcgctaaaggtcagtttgatagcgaaggtctgatggatttgagcaaactggaaggtgcgttcagcgatccgacaatgcagttctatctctgcggcccggttggcttcatgcagtttaccgcgaaacagttagtggatctgggcgtgaagcaggaaaacattcattacgaatgctttggcccgcataaggtgctgtagctcgagcctgcagggacccagctttcttgtacaaagtggtgatggggatcccccaccctgcaatgtgaccctagacttgtccatcttcggatggccaacttaattaatgtataaataaaaggatgcacacatagtgacatgctaatcactataatgtgggcatcaaagttgtgtgttatgtgtaattactaattatctgaataagagaaagagatcatccatatttcttatcctaaatgaatgtcacgtgtctttataattctttgatgaaccagatgcattttattaaccaattccatatacatataaatattaatcatatataattaatatcaattgggttagcaaaacaaatctagtctaggtgtgttttgctaattattgggggatagtgcaaaaagaaatctacgttctcaataattcagatagaaaacttaataaagtgagataatttacatagattgcttttatcctttgatatatgtgaaaccatgcatgatataaggaaaatagatagagaaataattttttacatcgttgaatatgtaaacaatttaattcaagaagctaggaatataaatattgaggagtttatgattattattattattttgatgttcaatgaagttttttttaatttcatatgaagtatacaaaaattcttcatagatttttgtttctatgccgtagttatctttaatatatttgtggttgaagaaatttattgctagaaacgaatggattgtcaatttttttttaaagcaaatatatatgaaattatactgtatattattttagtcatgattaaaatgtggccttaattgaatcatctttctcattcattttttcaaaagcatatcaggatgattgatatttatctattttaaaaattaatttaagggttcaaattaaatttaacttaaaagtgtcctaaccgtagttaaaggtttactttaaaaaaatactatgaaaaatctaatcttctatgaatcgacctgcaggatttaaatccatcgttctggggcctaacgggccaagctttccgatcctacctgtcacttcatcaaaaggacagtagaaaaggaaggtggcacctacaaatgccatcattgcgataaaggaaaggctatcattcaagatgcctctgccgacagtggtcccaaagatggacccccacccacgaggagcatcgtggaaaaagaagacgttccaaccacgtcttcaaagcaagtggattgatgtgatacttccactgacgtaagggatgacgcacaatcccactatccttcgcaagacccttcctctatataaggaagttcatttcatttggagaggacacgctgaaatcaccagtctctctctacaagatcggggatctctagctagacgatcgtttcgcatgattgaacaagatggattgcacgcaggttctccggccgcttgggtggagaggctattcggctatgactgggcacaacagacaatcggctgctctgatgccgccgtgttccggctgtcagcgcaggggcgcccggttctttttgtcaagaccgacctgtccggtgccctgaatgaactgcaggacgaggcagcgcggctatcgtggctggccacgacgggcgttccttgcgcagctgtgctcgacgttgtcactgaagcgggaagggactggctgctattgggcgaagtgccggggcaggatctcctgtcatctcaccttgctcctgccgagaaagtatccatcatggctgatgcaatgcggcggctgcatacgcttgatccggctacctgcccattcgaccaccaagcgaaacatcgcatcgagcgagcacgtactcggatggaagccggtcttgtcgatcaggatgatctggacgaagagcatcaggggctcgcgccagccgaactgttcgccaggctcaaggcgcgcatgcccgacggcgaggatctcgtcgtgacccatggcgatgcctgcttgccgaatatcatggtggaaaatggccgcttttctggattcatcgactgtggccggctgggtgtggcggaccgctatcaggacatagcgttggctacccgtgatattgctgaagagcttggcggcgaatgggctgaccgcttcctcgtgctttacggtatcgccgctcccgattcgcagcgcatcgccttctatcgccttcttgacgagttcttctgagcgggactctggggttcgaagaattcccgatcgttcaaacatttggcaataaagtttcttaagattgaatcctgttgccggtcttgcgatgattatcatataatttctgttgaattacgttaagcatgtaataattaacatgtaatgcatgacgttatttatgagatgggtttttatgattagagtcccgcaattatacatttaatacgcgatagaaaacaaaatatagcgcgcaaactaggataaattatcgcgcgcggtgtcatctatgttactagatcggggatatcgcgtgtctttataattctttgatgaaccagatgcattttattaaccaattccatatacatataaatattaatcatatataattaatatcaattgggttagcaaaacaaatctagtctaggtgtgttttgctaattattgggggatagtgcaaaaagaaatctacgttctcaataattcagatagaaaacttaataaagtgagataatttacatagattgcttttatcctttgatatatgtgaaaccatgcatgatataaggaaaatagatagagaaataattttttacatcgttgaatatgtaaacaatttaattcaagaagctaggaatataaatattgaggagtttatgattattattattattttgatgttcaatgaagttttttttaatttcatatgaagtatacaaaaattcttcatagatttttgtttctatgccgtagttatctttaatatatttgtggttgaagaaatttattgctagaaacgaatggattgtcaatttttttttaaagcaaatatatatgaaattatactgtatattattttagtcatgattaaaatgtggccttaattgaatcatctttctcattcattttttcaaaagcatatcaggatgattgatatttatctattttaaaaattaatttaagggttcaaattaaatttaacttaaaagtgtcctaaccgtagttaaaggtttactttaaaaaaatactatgaaaaatctaatcttctatgaatcgaccgctgatcgatcgcggccgctggcgcgccagtactagctagtacccaattcgccctatagtgagtcgtattacaattcactggccgtcgttttacaacgtcgtgactgggaaaaccctggcgttacccaacttaatcgccttgcagcacatccccctttcgccagctggcgtaatagcgaagaggcccgcaccgatcgcccttcccaacagttgcgcagcctgaatggcgaatggaaattgtaagcgttaatattttgttaaaattcgcgttaaatttttgttaaatcagctcattttttaaccaataggccgaaatcggcaaaatcccttataaatcaaaagaatagaccgagatagggttgagtgttgttccagtttggaacaagagtccactattaaagaacgtggactccaacgtcaaagggcgaaaaaccgtctatcagggcgatggcccactacgtgaaccatcaccctaatcaagttttttggggtcgaggtgccgtaaagcactaaatcggaaccctaaagggagcccccgatttagagcttgacggggaaagccggcgaacgtggcgagaaaggaagggaagaaagcgaaaggagcgggcgctagggcgctggcaagtgtagcggtcacgctgcgcgtaaccaccacacccgccgcgcttaatgcgccgctacagggcgcgtcaggtggcacttttcggggaaatgtgcgcggaacccctatttgtttatttttctaaatacattcaaatatgtatccgctcatgagacaataaccctgataaatgcttcaataatattgaaaaaggaagagtatgagtattcaacatttccgtgtcgcccttattcccttttttgcggcattttgccttcctgtttttgctcacccagaaacgctggtgaaagtaaaagatgctgaagatcagttgggtgcacgagtgggttacatcgaactggatctcaacagcggtaagatccttgagagttttcgccccgaagaacgttttccaatgatgagcacttttaaagttctgctatgtggcgcggtattatcccgtattgacgccgggcaagagcaactcggtcgccgcatacactattctcagaatgacttggttgagtactcaccagtcacagaaaagcatcttacggatggcatgacagtaagagaattatgcagtgctgccataaccatgagtgataacactgcggccaacttacttctgacaacgatcggaggaccgaaggagctaaccgcttttttgcacaacatgggggatcatgtaactcgccttgatcgttgggaaccggagctgaatgaagccataccaaacgacgagcgtgacaccacgatgcctgtagcaatggcaacaacgttgcgcaaactattaactggcgaactacttactctagcttcccggcaacaattaatagactggatggaggcggataaagttgcaggaccacttctgcgctcggcccttccggctggctggtttattgctgataaatctggagccggtgagcgtgggtctcgcggtatcattgcagcactggggccagatggtaagccctcccgtatcgtagttatctacacgacggggagtcaggcaactatggatgaacgaaatagacagatcgctgagataggtgcctcactgattaagcattggtaactgtcagaccaagtttactcatatatactttagattgatttaaaacttcatttttaatttaaaaggatctaggtgaagatcctttttgataatctcatgaccaaaatcccttaacgtgagttttcgttccactgagcgtcagaccccgtagaaaagatcaaaggatcttcttgagatcctttttttctgcgcgtaatctgctgcttgcaaacaaaaaaaccaccgctaccagcggtggtttgtttgccggatcaagagctaccaactctttttccgaaggtaactggcttcagcagagcgcagataccaaatactgtccttctagtgtagccgtagttaggccaccacttcaagaactctgtagcaccgcctacatacctcgctctgctaatcctgttaccagtggctgctgccagtggcgataagtcgtgtcttaccgggttggactcaagacgatagttaccggataaggcgcagcggtcgggctgaacggggggttcgtgcacacagcccagcttggagcgaacgacctacaccgaactgagatacctacagcgtgagctatgagaaagcgccacgcttcccgaagggagaaaggcggacaggtatccggtaagcggcagggtcggaacaggagagcgcacgagggagcttccagggggaaacgcctggtatctttatagtcctgtcgggtttcgccacctctgacttgagcgtcgatttttgtgatgctcgtcaggggggcggagcctatggaaaaacgccagcaacgcggcctttttacggttcctggccttttgctggccttttgctcacatgttctttcctgcgttatcccctgattctgtggataaccgtattaccgcctttgagtgagctgataccgctcgccgcagccgaacgaccgagcgcagcgagtcagtgagcgaggaagcggaagagcgcccaatacgcaaaccgcctctccccgcgcgttggccgattcattaatgcagctggcacgacaggtttcccgactggaaagcgggcagtgagcgcaacgcaattaatgtgagttagctcactcattaggcaccccaggctttacactttatgcttccggctcgtatgttgtgtggaattgtgagcggataacaatttcacacaggaaacagctatgaccatgattacgccaagctcgaaattaaccctcactaaagggaacaaaagctggagctgagtact

SEQ ID NO: 258 - DNA, 8786 bp, Artificial
  the full length sequence of pMON67827
cctttgagtgagctgataccgctcgccgcagccgaacgaccgagcgcagcgagtcagtgagcgaggaagcggaagagcgcccaatacgcaaaccgcctctccccgcgcgttggccgattcattaatgcagctggcacgacaggtttcccgactggaaagcgggcagtgagcgcaacgcaattaatgtgagttagctcactcattaggcaccccaggctttacactttatgcttccggctcgtatgttgtgtggaattgtgagcggataacaatttcacacaggaaacagctatgaccatgattacgccaagctcgaaattaaccctcactaaagggaacaaaagctggagctgagtactggcgcgcctgcggccgcctcgaggtcattcatatgcttgagaagagagtcgggatagtccaaaataaaacaaaggtaagattacctggtcaaaagtgaaaacatcagttaaaaggtggtataaagtaaaatatcggtaataaaaggtggcccaaagtgaaatttactcttttctactattataaaaattgaggatgtttttgtcggtactttgatacgtcatttttgtatgaattggtttttaagtttattcgcttttggaaatgcatatctgtatttgagtcgggttttaagttcgtttgcttttgtaaatacagagggatttgtataagaaatatctttaaaaaaacccatatgctaatttgacataatttttgagaaaaatatatattcaggcgaattctcacaatgaacaataataagattaaaatagctttcccccgttgcagcgcatgggtattttttctagtaaaaataaaagataaacttagactcaaaacatttacaaaaacaacccctaaagttcctaaagcccaaagtgctatccacgatccattagcaaggcccagcccaacccaacccaacccaacccaccccagtccagccaactggacaatagtctccacccccggcactatcaccgtgagttgtccgcaccaccgcacgtctcgcagccaaaaaaaaaaaaagaaagaaaaaaaagaaaaagaaaaacagcaggtgggtccgggtcgtgggggccggaaaagcgaggaggatcgcgagcagcgacgaggcccggccctccctccgcttccaaagaaacgccccccatcgccactatatacatacccccccctctcctcccatccccccaaccctaccaccaccaccaccaccacctcctcccccctcgctgccggacgacgagctcctcccccctccccctccgccgccgccggtaaccaccccgcccctctcctctttctttctccgttttttttttcgtctcggtctcgatctttggccttggtagtttgggtgggcgagagcggcttcgtcgcccagatcggtgcgcgggaggggcgggatctcgcggctggcgtctccgggcgtgagtcggcccggatcctcgcggggaatggggctctcggatgtagatctgatccgccgttgttgggggagatgatggggggtttaaaatttccgccatgctaaacaagatcaggaagaggggaaaagggcactatggtttatatttttatatatttctgctgcttcgtcaggcttagatgtgctagatctttctttcttctttttgtgggtagaatttgaatccctcagcattgttcatcggtagtttttcttttcatgatttgtgacaaatgcagcctcgtgcggagcttttttgtaggtagaccgcgggatatcacaagtttgtacaaaaaagcaggctcctgcaggaccatgctagccgaaaaaacccgttccataatcaaagcaaccgttcctgttttggaacagcagggcactgtcatcacgcgtacattctacaaaaatatgcttactgaacacaccgaattacttaatatttttaacagaactaatcaaaaggttggcgcacaaccaaatgccttggccactactgttttggcagcggctaagaacattgacgatttgtctgtgcttatggaccatgtcaagcaaattggccacaagcatcgtgccttgcaaattaaacctgagcattatccaatcgttggtgagtacttgttaaaagcaatcaaggaagttttaggcgatgctgcgactccagagataattaatgcatggggcgaggcttaccaagcaattgctgacatcttcatcactgttgaaaaaaaaatgtacgaagaagctttatggccaggttggaaaccatttgacattactgccaaagagtacgttgcttcagatattgttgaatttactgttaagccaaagttcggttctggtattgaattggaaagcttgccaatcactccaggtcagtatattacggtaaacactcacccaattagacaggaaaaccaatacgacgctttaagacactactctctttgttctgcttcaactaaaaatggtttacgatttgcagtaaagatggaagctgccagagaaaattttcctgcaggattagtctctgaatatttacacaaggacgctaaagttggtgatgaaattaagcttagtgctccggctggtgatttcgcaataaataaagagttgatacaccaaaacgaagttccattggtgttactatcgtctggtgttggtgttacaccacttttagctatgttagaagaacaagtcaaatgcaacccaaataggccaatttactggattcaatcttcctatgatgaaaagactcaagcattcaaaaaacatgtagatgaactattagctgaatgtgcgaatgtcgacaaaataattgttcatactgatactgaaccactgattaatgctgcattcttgaaggaaaagtcacctgcgcatgccgatgtctacacttgcggctctttagcttttatgcaagctatgattggtcatctaaaagaactagagcatcgtgatgatatgattcactatgaaccatttggtccaaagatgtcaaccgtgcaagtttagctcgagcctgcagggacccagctttcttgtacaaagtggtgatggggatcccccaccctgcaatgtgaccctagacttgtccatcttcggatggccaacttaattaatgtataaataaaaggatgcacacatagtgacatgctaatcactataatgtgggcatcaaagttgtgtgttatgtgtaattactaattatctgaataagagaaagagatcatccatatttcttatcctaaatgaatgtcacgtgtctttataattctttgatgaaccagatgcattttattaaccaattccatatacatataaatattaatcatatataattaatatcaattgggttagcaaaacaaatctagtctaggtgtgttttgctaattattgggggatagtgcaaaaagaaatctacgttctcaataattcagatagaaaacttaataaagtgagataatttacatagattgcttttatcctttgatatatgtgaaaccatgcatgatataaggaaaatagatagagaaataattttttacatcgttgaatatgtaaacaatttaattcaagaagctaggaatataaatattgaggagtttatgattattattattattttgatgttcaatgaagttttttttaatttcatatgaagtatacaaaaattcttcatagatttttgtttctatgccgtagttatctttaatatatttgtggttgaagaaatttattgctagaaacgaatggattgtcaatttttttttaaagcaaatatatatgaaattatactgtatattattttagtcatgattaaaatgtggccttaattgaatcatctttctcattcattttttcaaaagcatatcaggatgattgatatttatctattttaaaaattaatttaagggttcaaattaaatttaacttaaaagtgtcctaaccgtagttaaaggtttactttaaaaaaatactatgaaaaatctaatcttctatgaatcgacctgcaggatttaaatccatcgttctggggcctaacgggccaagctttccgatcctacctgtcacttcatcaaaaggacagtagaaaaggaaggtggcacctacaaatgccatcattgcgataaaggaaaggctatcattcaagatgcctctgccgacagtggtcccaaagatggacccccacccacgaggagcatcgtggaaaaagaagacgttccaaccacgtcttcaaagcaagtggattgatgtgatacttccactgacgtaagggatgacgcacaatcccactatccttcgcaagacccttcctctatataaggaagttcatttcatttggagaggacacgctgaaatcaccagtctctctctacaagatcggggatctctagctagacgatcgtttcgcatgattgaacaagatggattgcacgcaggttctccggccgcttgggtggagaggctattcggctatgactgggcacaacagacaatcggctgctctgatgccgccgtgttccggctgtcagcgcaggggcgcccggttctttttgtcaagaccgacctgtccggtgccctgaatgaactgcaggacgaggcagcgcggctatcgtggctggccacgacgggcgttccttgcgcagctgtgctcgacgttgtcactgaagcgggaagggactggctgctattgggcgaagtgccggggcaggatctcctgtcatctcaccttgctcctgccgagaaagtatccatcatggctgatgcaatgcggcggctgcatacgcttgatccggctacctgcccattcgaccaccaagcgaaacatcgcatcgagcgagcacgtactcggatggaagccggtcttgtcgatcaggatgatctggacgaagagcatcaggggctcgcgccagccgaactgttcgccaggctcaaggcgcgcatgcccgacggcgaggatctcgtcgtgacccatggcgatgcctgcttgccgaatatcatggtggaaaatggccgcttttctggattcatcgactgtggccggctgggtgtggcggaccgctatcaggacatagcgttggctacccgtgatattgctgaagagcttggcggcgaatgggctgaccgcttcctcgtgctttacggtatcgccgctcccgattcgcagcgcatcgccttctatcgccttcttgacgagttcttctgagcgggactctggggttcgaagaattcccgatcgttcaaacatttggcaataaagtttcttaagattgaatcctgttgccggtcttgcgatgattatcatataatttctgttgaattacgttaagcatgtaataattaacatgtaatgcatgacgttatttatgagatgggtttttatgattagagtcccgcaattatacatttaatacgcgatagaaaacaaaatatagcgcgcaaactaggataaattatcgcgcgcggtgtcatctatgttactagatcggggatatcgcgtgtctttataattctttgatgaaccagatgcattttattaaccaattccatatacatataaatattaatcatatataattaatatcaattgggttagcaaaacaaatctagtctaggtgtgttttgctaattattgggggatagtgcaaaaagaaatctacgttctcaataattcagatagaaaacttaataaagtgagataatttacatagattgcttttatcctttgatatatgtgaaaccatgcatgatataaggaaaatagatagagaaataattttttacatcgttgaatatgtaaacaatttaattcaagaagctaggaatataaatattgaggagtttatgattattattattattttgatgttcaatgaagttttttttaatttcatatgaagtatacaaaaattcttcatagatttttgtttctatgccgtagttatctttaatatatttgtggttgaagaaatttattgctagaaacgaatggattgtcaatttttttttaaagcaaatatatatgaaattatactgtatattattttagtcatgattaaaatgtggccttaattgaatcatctttctcattcattttttcaaaagcatatcaggatgattgatatttatctattttaaaaattaatttaagggttcaaattaaatttaacttaaaagtgtcctaaccgtagttaaaggtttactttaaaaaaatactatgaaaaatctaatcttctatgaatcgaccgctgatcgatcgcggccgctggcgcgccagtactagctagtacccaattcgccctatagtgagtcgtattacaattcactggccgtcgttttacaacgtcgtgactgggaaaaccctggcgttacccaacttaatcgccttgcagcacatccccctttcgccagctggcgtaatagcgaagaggcccgcaccgatcgcccttcccaacagttgcgcagcctgaatggcgaatggaaattgtaagcgttaatattttgttaaaattcgcgttaaatttttgttaaatcagctcattttttaaccaataggccgaaatcggcaaaatcccttataaatcaaaagaatagaccgagatagggttgagtgttgttccagtttggaacaagagtccactattaaagaacgtggactccaacgtcaaagggcgaaaaaccgtctatcagggcgatggcccactacgtgaaccatcaccctaatcaagttttttggggtcgaggtgccgtaaagcactaaatcggaaccctaaagggagcccccgatttagagcttgacggggaaagccggcgaacgtggcgagaaaggaagggaagaaagcgaaaggagcgggcgctagggcgctggcaagtgtagcggtcacgctgcgcgtaaccaccacacccgccgcgcttaatgcgccgctacagggcgcgtcaggtggcacttttcggggaaatgtgcgcggaacccctatttgtttatttttctaaatacattcaaatatgtatccgctcatgagacaataaccctgataaatgcttcaataatattgaaaaaggaagagtatgagtattcaacatttccgtgtcgcccttattcccttttttgcggcattttgccttcctgtttttgctcacccagaaacgctggtgaaagtaaaagatgctgaagatcagttgggtgcacgagtgggttacatcgaactggatctcaacagcggtaagatccttgagagttttcgccccgaagaacgttttccaatgatgagcacttttaaagttctgctatgtggcgcggtattatcccgtattgacgccgggcaagagcaactcggtcgccgcatacactattctcagaatgacttggttgagtactcaccagtcacagaaaagcatcttacggatggcatgacagtaagagaattatgcagtgctgccataaccatgagtgataacactgcggccaacttacttctgacaacgatcggaggaccgaaggagctaaccgcttttttgcacaacatgggggatcatgtaactcgccttgatcgttgggaaccggagctgaatgaagccataccaaacgacgagcgtgacaccacgatgcctgtagcaatggcaacaacgttgcgcaaactattaactggcgaactacttactctagcttcccggcaacaattaatagactggatggaggcggataaagttgcaggaccacttctgcgctcggcccttccggctggctggtttattgctgataaatctggagccggtgagcgtgggtctcgcggtatcattgcagcactggggccagatggtaagccctcccgtatcgtagttatctacacgacggggagtcaggcaactatggatgaacgaaatagacagatcgctgagataggtgcctcactgattaagcattggtaactgtcagaccaagtttactcatatatactttagattgatttaaaacttcatttttaatttaaaaggatctaggtgaagatcctttttgataatctcatgaccaaaatcccttaacgtgagttttcgttccactgagcgtcagaccccgtagaaaagatcaaaggatcttcttgagatcctttttttctgcgcgtaatctgctgcttgcaaacaaaaaaaccaccgctaccagcggtggtttgtttgccggatcaagagctaccaactctttttccgaaggtaactggcttcagcagagcgcagataccaaatactgtccttctagtgtagccgtagttaggccaccacttcaagaactctgtagcaccgcctacatacctcgctctgctaatcctgttaccagtggctgctgccagtggcgataagtcgtgtcttaccgggttggactcaagacgatagttaccggataaggcgcagcggtcgggctgaacggggggttcgtgcacacagcccagcttggagcgaacgacctacaccgaactgagatacctacagcgtgagctatgagaaagcgccacgcttcccgaagggagaaaggcggacaggtatccggtaagcggcagggtcggaacaggagagcgcacgagggagcttccagggggaaacgcctggtatctttatagtcctgtcgggtttcgccacctctgacttgagcgtcgatttttgtgatgctcgtcaggggggcggagcctatggaaaaacgccagcaacgcggcctttttacggttcctggccttttgctggccttttgctcacatgttctttcctgcgttatcccctgattctgtggataaccgtattaccg

SEQ ID NO: 259 - DNA, 12635 bp, Artificial
  the full length sequence of pMON95605
cgatcgcgggcccggtaccctgcaatgtgaccctagacttgtccatcttctggattggccaacttaattaatgtatgaaataaaaggatgcacacatagtgacatgctaatcactataatgtgggcatcaaagttgtgtgttatgtgtaattactaattatctgaataagagaaagagatcatccatatttcttatcctaaatgaatgtcacgtgtctttataattctttgatgaaccagatgcattttattaaccaattccatatacatataaatattaatcatatataattaatatcaattgggttagcaaaacaaatctagtctaggtgtgttttgctaattattgggggatagtgcaaaaagaaatctacgttctcaataattcagatagaaaacttaataaagtgagataatttacatagattgcttttatcctttgatatatgtgaaaccatgcatgatataaggaaaatagatagagaaataattttttacatcgttgaatatgtaaacaatttaattcaagaagctaggaatataaatattgaggagtttatgattattattattattttgatgttcaatgaagttttttttaatttcatatgaagtatacaaaaattcttcatagatttttgtttctatgccgtagttatctttaatatatttgtggttgaagaaatttattgctagaaacgaatggattgtcaatttttttttaaagcaaatatatatgaaattatactgtatattattttagtcatgattaaaatgtggccttaattgaatcatctttctcattcattttttcaaaagcatatcaggatgattgatatttatctattttaaaaattaatttaagggttcaaattaaatttaacttaaaagtgtcctaaccgtagttaaaggtttactttaaaaaaatactatgaaaaatctaatcttctatgaatcgacctgcaggatttaaatccatcgttctggggcctaacgggccaagcttactcgaggtcattcatatgcttgagaagagagtcgggatagtccaaaataaaacaaaggtaagattacctggtcaaaagtgaaaacatcagttaaaaggtggtataaagtaaaatatcggtaataaaaggtggcccaaagtgaaatttactcttttctactattataaaaattgaggatgtttttgtcggtactttgatacgtcatttttgtatgaattggtttttaagtttattcgcttttggaaatgcatatctgtatttgagtcgggttttaagttcgtttgcttttgtaaatacagagggatttgtataagaaatatctttagaaaaacccatatgctaatttgacataatttttgagaaaaatatatattcaggcgaattctcacaatgaacaataataagattaaaatagctttcccccgttgcagcgcatgggtattttttctagtaaaaataaaagataaacttagactcaaaacatttacaaaaacaacccctaaagttcctaaagcccaaagtgctatccacgatccatagcaagcccagcccaacccaacccaacccaacccaccccagtccagccaactggacaatagtctccacacccccccactatcaccgtgagttgtccgcacgcaccgcacgtctcgcagccaaaaaaaaaaagaaagaaaaaaaagaaaaagaaaaaacagcaggtgggtccgggtcgtgggggccggaaacgcgaggaggatcgcgagccagcgacgaggccggccctccctccgcttccaaagaaacgccccccatcgccactatatacatacccccccctctcctcccatccccccaaccctaccaccaccaccaccaccacctccacctcctcccccctcgctgccggacgacgagctcctcccccctccccctccgccgccgccgcgccggtaaccaccccgcccctctcctctttctttctccgtttttttttccgtctcggtctcgatctttggccttggtagtttgggtgggcgagaggcggcttcgtgcgcgcccagatcggtgcgcgggaggggcgggatctcgcggctggggctctcgccggcgtggatccggcccggatctcgcggggaatggggctctcggatgtagatctgcgatccgccgttgttgggggagatgatggggggtttaaaatttccgccgtgctaaacaagatcaggaagaggggaaaagggcactatggtttatatttttatatatttctgctgcttcgtcaggcttagatgtgctagatctttctttcttctttttgtgggtagaatttgaatccctcagcattgttcatcggtagtttttcttttcatgatttgtgacaaatgcagcctcgtgcggagcttttttgtaggtagaagtgatcaaccatggcgcaagttagcagaatctgcaatggtgtgcagaacccatctcttatctccaatctctcgaaatccagtcaacgcaaatctcccttatcggtttctctgaagacgcagcagcatccacgagcttatccgatttcgtcgtcgtggggattgaagaagagtgggatgacgttaattggctctgagcttcgtcctcttaaggtcatgtcttctgtttccacggcgtgcatgcttcacggtgcaagcagccggcccgcaaccgcccgcaaatcctctggcctttccggaaccgtccgcattcccggcgacaagtcgatctcccaccggtccttcatgttcggcggtctcgcgagcggtgaaacgcgcatcaccggccttctggaaggcgaggacgtcatcaatacgggcaaggccatgcaggcgatgggcgcccgcatccgtaaggaaggcgacacctggatcatcgatggcgtcggcaatggcggcctcctggcgcctgaggcgccgctcgatttcggcaatgccgccacgggctgccgcctgacgatgggcctcgtcggggtctacgatttcgacagcaccttcatcggcgacgcctcgctcacaaagcgcccgatgggccgcgtgttgaacccgctgcgcgaaatgggcgtgcaggtgaaatcggaagacggtgaccgtcttcccgttaccttgcgcgggccgaagacgccgacgccgatcacctaccgcgtgccgatggcctccgcacaggtgaagtccgccgtgctgctcgccggcctcaacacgcccggcatcacgacggtcatcgagccgatcatgacgcgcgatcatacggaaaagatgctgcagggctttggcgccaaccttaccgtcgagacggatgcggacggcgtgcgcaccatccgcctggaaggccgcggcaagctcaccggccaagtcatcgacgtgccgggcgacccgtcctcgacggccttcccgctggttgcggccctgcttgttccgggctccgacgtcaccatcctcaacgtgctgatgaaccccacccgcaccggcctcatcctgacgctgcaggaaatgggcgccgacatcgaagtcatcaacccgcgccttgccggcggcgaagacgtggcggacctgcgcgttcgctcctccacgctgaagggcgtcacggtgccggaagaccgcgcgccttcgatgatcgacgaatatccgattctcgctgtcgccgccgccttcgcggaaggggcgaccgtgatgaacggtctggaagaactccgcgtcaaggaaagcgaccgcctctcggccgtcgccaatggcctcaagctcaatggcgtggattgcgatgagggcgagacgtcgctcgtcgtgcgtggccgccctgacggcaaggggctcggcaacgcctcgggcgccgccgtcgccacccatctcgatcaccgcatcgccatgagcttcctcgtcatgggcctcgtgtcggaaaaccctgtcacggtggacgatgccacgatgatcgccacgagcttcccggagttcatggacctgatggccgggctgggcgcgaagatcgaactctccgatacgaaggctgcctgatgagctcgaattcccgatcgttcaaacatttggcaataaagtttcttaagattgaatcctgttgccggtcttgcgatgattatcatataatttctgttgaattacgttaagcatgtaataattaacatgtaatgcatgacgttatttatgagatgggtttttatgattagagtcccgcaattatacatttaatacgcgatagaaaacaaaatatagcgcgcaaactaggataaattatcgcgcgcggtgtcatctatgttactagatcggggatgggggatccactagtgatatccgtcgactggtacctacgcgtagctagcccgtgaagtttctcatctaagcccccatttggacgtgaatgtagacacgtcgaaataaagatttccgaattagaataatttgtttattgctttcgcctataaatacgacggatcgtaatttgtcgttttatcaaaatgtactttcattttataataacgctgcggacatctacatttttgaattgaaaaaaaattggtaattactctttctttttctccatattgaccatcatactcattgctgatccatgtagatttcccggacatgaagccatttacaattgaatatatcctgccgccgctgccgctttgcacccggtggagcttgcatgttggtttctacgcagaactgagccggttaggcagataatttccattgagaactgagccatgtgcaccttccccccaacacggtgagcgacggggcaacggagtgatccacatgggacttttcctagcttggctgccatttttggggtgaggccgttcgcggccgaggggcgcagcccctggggggatgggaggcccgcgttagcgggccgggagggttcgagaagggggggcaccccccttcggcgtgcgcggtcacgcgcacagggcgcagccctggttaaaaacaaggtttataaatattggtttaaaagcaggttaaaagacaggttagcggtggccgaaaaacgggcggaaacccttgcaaatgctggattttctgcctgtggacagcccctcaaatgtcaataggtgcgcccctcatctgtcagcactctgcccctcaagtgtcaaggatcgcgcccctcatctgtcagtagtcgcgcccctcaagtgtcaataccgcagggcacttatccccaggcttgtccacatcatctgtgggaaactcgcgtaaaatcaggcgttttcgccgatttgcgaggctggccagctccacgtcgccggccgaaatcgagcctgcccctcatctgtcaacgccgcgccgggtgagtcggcccctcaagtgtcaacgtccgcccctcatctgtcagtgagggccaagttttccgcgaggtatccacaacgccggcggccggccgcggtgtctcgcacacggcttcgacggcgtttctggcgcgtttgcagggccatagacggccgccagcccagcggcgagggcaaccagcccggtgagcgtcggaaagggtcgatcgaccgatgcccttgagagccttcaacccagtcagctccttccggtgggcgcggggcatgactatcgtcgccgcacttatgactgtcttctttatcatgcaactcgtaggacaggtgccggcagcgctctgggtcattttcggcgaggaccgctttcgctggagcgcgacgatgatcggcctgtcgcttgcggtattcggaatcttgcacgccctcgctcaagccttcgtcactggtcccgccaccaaacgtttcggcgagaagcaggccattatcgccggcatggcggccgacgcgctgggctacgtcttgctggcgttcgcgacgcgaggctggatggccttccccattatgattcttctcgcttccggcggcatcgggatgcccgcgttgcaggccatgctgtccaggcaggtagatgacgaccatcagggacagcttcaaggatcgctcgcggctcttaccagcctaacttcgatcattggaccgctgatcgtcacggcgatttatgccgcctcggcgagcacatggaacgggttggcatggattgtaggcgccgccctataccttgtctgcctccccgcgttgcgtcgcggtgcatggagccgggccacctcgacctgaatggaagccggcggcacctcgctaacggattcaccactccaagaattggagccaatcaattcttgcggagaactgtgaatgcgcaaaccaacccttggcagaacatatccatcgcgtccgccatctccagcagccgcacgcggcgcatctcgggcagcgttgggtcctggccacgggtgcgcatgatcgtgctcctgtcgttgaggacccggctaggctggcggggttgccttactggttagcagaatgaatcaccgatacgcgagcgaacgtgaagcgactgctgctgcaaaacgtctgcgacctgagcaacaacatgaatggtcttcggtttccgtgtttcgtaaagtctggaaacgcggaagtcagcgccctgcaccattatgttccggatctgcatcgcaggatgctgctggctaccctgtggaacacctacatctgtattaacgaagcgctggcattgaccctgagtgatttttctctggtcccgccgcatccataccgccagttgtttaccctcacaacgttccagtaaccgggcatgttcatcatcagtaacccgtatcgtgagcatcctctctcgtttcatcggtatcattacccccatgaacagaaatcccccttacacggaggcatcagtgaccaaacaggaaaaaaccgcccttaacatggcccgctttatcagaagccagacattaacgcttctggagaaactcaacgagctggacgcggatgaacaggcagacatctgtgaatcgcttcacgaccacgctgatgagctttaccgcagctgcctcgcgcgtttcggtgatgacggtgaaaacctctgacacatgcagctcccggagacggtcacagcttgtctgtaagcggatgccgggagcagacaagcccgtcagggcgcgtcagcgggtgttggcgggtgtcggggcgcagccatgacccagtcacgtagcgatagcggagtgtatactggcttaactatgcggcatcagagcagattgtactgagagtgcaccatatgcggtgtgaaataccgcacagatgcgtaaggagaaaataccgcatcaggcgctcttccgcttcctcgctcactgactcgctgcgctcggtcgttcggctgcggcgagcggtatcagctcactcaaaggcggtaatacggttatccacagaatcaggggataacgcaggaaagaacatgtgagcaaaaggccagcaaaaggccaggaaccgtaaaaaggccgcgttgctggcgtttttccataggctccgcccccctgacgagcatcacaaaaatcgacgctcaagtcagaggtggcgaaacccgacaggactataaagataccaggcgtttccccctggaagctccctcgtgcgctctcctgttccgaccctgccgcttaccggatacctgtccgcctttctcccttcgggaagcgtggcgctttctcatagctcacgctgtaggtatctcagttcggtgtaggtcgttcgctccaagctgggctgtgtgcacgaaccccccgttcagcccgaccgctgcgccttatccggtaactatcgtcttgagtccaacccggtaagacacgacttatcgccactggcagcagccactggtaacaggattagcagagcgaggtatgtaggcggtgctacagagttcttgaagtggtggcctaactacggctacactagaaggacagtatttggtatctgcgctctgctgaagccagttaccttcggaaaaagagttggtagctcttgatccggcaaacaaaccaccgctggtagcggtggtttttttgtttgcaagcagcagattacgcgcagaaaaaaaggatctcaagaagatcctttgatcttttctacggggtctgacgctcagtggaacgaaaactcacgttaagggattttggtcatgagattatcaaaaaggatcttcacctagatccttttaaattaaaaatgaagttttaaatcaatctaaagtatatatgagtaaacttggtctgacagttaccaatgcttaatcagtgaggcacctatctcagcgatctgtctatttcgttcatccatagttgcctgactccccgtcgtgtagataactacgatacgggagggcttaccatctggccccagtgctgcaatgataccgcgagacccacgctcaccggctccagatttatcagcaataaaccagccagccggaagggccgagcgcagaagtggtcctgcaactttatccgcctccatccagtctattaattgttgccgggaagctagagtaagtagttcgccagttaatagtttgcgcaacgttgttgccattgctgcaggtcgggagcacaggatgacgcctaacaattcattcaagccgacaccgcttcgcggcgcggcttaattcaggagttaaacatcatgagggaagcggtgatcgccgaagtatcgactcaactatcagaggtagttggcgtcatcgagcgccatctcgaaccgacgttgctggccgtacatttgtacggctccgcagtggatggcggcctgaagccacacagtgatattgatttgctggttacggtgaccgtaaggcttgatgaaacaacgcggcgagctttgatcaacgaccttttggaaacttcggcttcccctggagagagcgagattctccgcgctgtagaagtcaccattgttgtgcacgacgacatcattccgtggcgttatccagctaagcgcgaactgcaatttggagaatggcagcgcaatgacattcttgcaggtatcttcgagccagccacgatcgacattgatctggctatcttgctgacaaaagcaagagaacatagcgttgccttggtaggtccagcggcggaggaactctttgatccggttcctgaacaggatctatttgaggcgctaaatgaaaccttaacgctatggaactcgccgcccgactgggctggcgatgagcgaaatgtagtgcttacgttgtcccgcatttggtacagcgcagtaaccggcaaaatcgcgccgaaggatgtcgctgccgactgggcaatggagcgcctgccggcccagtatcagcccgtcatacttgaagctaggcaggcttatcttggacaagaagatcgcttggcctcgcgcgcagatcagttggaagaatttgttcactacgtgaaaggcgagatcaccaaggtagtcggcaaataatgtctaacaattcgttcaagccgacgccgcttcgcggcgcggcttaactcaagcgttagatgctgcaggcatcgtggtgtcacgctcgtcgtttggtatggcttcattcagctccggttcccaacgatcaaggcgagttacatgatcccccatgttgtgcaaaaaagcggttagctccttcggtcctccgatcgaggatttttcggcgctgcgctacgtccgcgaccgcgttgagggatcaagccacagcagcccactcgaccttctagccgacccagacgagccaagggatctttttggaatgctgctccgtcgtcaggctttccgacgtttgggtggttgaacagaagtcattatcgcacggaatgccaagcactcccgaggggaaccctgtggttggcatgcacatacaaatggacgaacggataaaccttttcacgcccttttaaatatccgattattctaataaacgctcttttctcttaggtttacccgccaatatatcctgtcaaacactgatagtttaaactgaaggcgggaaacgacaatctggcgcgcctgcggccgcctcgaggtcattcatatgcttgagaagagagtcgggatagtccaaaataaaacaaaggtaagattacctggtcaaaagtgaaaacatcagttaaaaggtggtataaagtaaaatatcggtaataaaaggtggcccaaagtgaaatttactcttttctactattataaaaattgaggatgtttttgtcggtactttgatacgtcatttttgtatgaattggtttttaagtttattcgcttttggaaatgcatatctgtatttgagtcgggttttaagttcgtttgcttttgtaaatacagagggatttgtataagaaatatctttaaaaaaacccatatgctaatttgacataatttttgagaaaaatatatattcaggcgaattctcacaatgaacaataataagattaaaatagctttcccccgttgcagcgcatgggtattttttctagtaaaaataaaagataaacttagactcaaaacatttacaaaaacaacccctaaagttcctaaagcccaaagtgctatccacgatccatagcaagcccagcccaacccaacccaacccaacccaccccagtccagccaactggacaatagtctccacacccccccactatcaccgtgagttgtccgcacgcaccgcacgtctcgcagccaaaaaaaaaaaaagaaagaaaaaaaagaaaaagaaaaaacagcaggtgggtccgggtcgtgggggccggaaacgcgaggaggatcgcgagccagcgacgaggccggccctccctccgcttccaaagaaacgccccccatcgccactatatacatacccccccctctcctcccatccccccaaccctaccaccaccaccaccaccacctccacctcctcccccctcgctgccggacgacgagctcctcccccctccccctccgccgccgccgcgccggtaaccaccccgcccctctcctctttctttctccgttttttttttccgtctcggtctcgatctttggccttggtagtttgggtgggcgagaggcggcttcgtgcgcgcccagatcggtgcgcgggaggggcgggatctcgcggctggggctctcgccggcgtggatccggcccggatctcgcggggaatggggctctcggatgtagatctgcgatccgccgttgttgggggagatgatggggggtttaaaatttccgccatgctaaacaagatcaggaagaggggaaaagggcactatggtttatatttttatatatttctgctgcttcgtcaggcttagatgtgctagatctttctttcttctttttgtgggtagaatttgaatccctcagcattgttcatcggtagtttttcttttcatgatttgtgacaaatgcagcctcgtgcggagcttttttgtaggtagaccgcggaccggtcgcgcctcagcagtcgctgtcgttaccatgaccctcaccgacgcccaaatatccatcgtcaaatccaccgcccctgtcctcaagcaacacggcgaagccatcaccaccgtcttctacaacgacctcatcacggagaacccctccctcaaaaacatcttcagccttacctcgcaagccaccggcgcccaaccgcgcgccctcgcccacgccgtcctcgcctatgccacctacatcgacaacctttccgcgctctcggaggcggtcgcgcgcattgcgcacaagcacgtgtctctccaagtcgagccggcgcagtacgctattgtcggccaatacctgatccaagccatcggcaaggttctgggcgatgcggcgactcccgagattgtagacgcttggacggcggcatatggagttttggcgaacgtttttattggcgtcgagggaggcatgtacgaggagaatgaaaagaaagaccactggaaggggtggaggaagttcaggattgcgaggaaggtggaggagagcagttccatttcgagcttttacctgaggcccgtggatggggccactctgcccaagtatctgcctggccagtatgtgtctgtgcaggtgctggtctcgcagttggggtatttgcagagtaggcagtacagcttgagcgaggcgccgaaggagggcgggatggaggaatatcgtattagtgtcaagagggaggaaggggaaaccggtgcgccgggactggtttccaacttgctccatggtatgcaagagggcgcggaggtggaggttagtcatccccagggcgagttcttccttgaccccgcggatgcaagcaaggagggggtgccggctgtgttgatctcggtgggcgtgggcgctactccgatgatggctatcctcaagagcttgcttcaggagaatgtcaagaggagaccggtgtcgtggatccatgcgagcaagtcgagctcgacgcagccgtttggcgaggaggtgaggcgcatcgtcaaggagaaccctgagcaggtgtcggcacatgtgtttctgaagacggtggctggtacggatcaggccggtgtgcattacgattttgcggatacgaggatggacttgaccaagttggatggggagcgggatctgcatttggcggataagaggaccgagtactacatctgcggaccggagacgtttatggtggaaaccaggaaagtgttggttggtcttggagtagataagagcaaggtgcacttggagctttttgctacgggtttcgttgctgatgagtagaacccagcggtactcgctgagg

SEQ ID NO: 260 - DNA, 1188 bp, artificial
  codon optimized HMP from Erwinia chrysanthemi
atgctcgaccagcagaccatcgccaccatcaagtccaccatccctctcctggccgagaccggccctgccctcaccgcccacttctaccagcgcatgttccaccacaaccctgagctcaaggacatcttcaacatgagcaaccagcgcaacggcgaccagcgcgaggccctgttcaacgccatctgcgcctacgccacccacatcgagaacctccctgccctcctgcccgccgtggagcgcatcgcccagaagcacgcctccttcaacatccagcccgagcagtaccagatcgtcggcacccacctcctcgccaccctggaggaaatgttccagcccggccaggccgtgctcgacgcctggggcaagcgctacggcgtgctcgccaacgtcttcatccagagggagtccgacatctaccagcaatccgctggccagaacggcggttggcacggcatcaggcccttcaggatcgtggctaagcagcctcagtccagcctcatcacttccttcactctcgaacccgtggacggtgggcccatcgctgcgttcaggccgggtcagtacctggctgtgtacattagggacaagcgtttcgagtaccaggagattcgtcagtacagcctgactaacgagcctaatggtcgttactatcggattgctgtgaagcgggagactatgggttctgtcagcggttacctgcacgacgtcgctcgggagggagatgtcattgagctggctgcgccgcacggagatttctacctggaggtcactccggagacgccggtcgctctgatttctgctggagttgggcagacgccgatgctgtctatgcttcactcgcttaagaatcagcaacaccaggctgacatcttctggcttcacgctgcggagaatacggaggttcatgcgtttgctgatgagattgcggatgttgcggcaacgcttccgcagcttcaatcgtatgtttggtatcgagaggcgtcaagtgaagcggcaagatcagcacatgcgtttcatgggcttatggcacttaaagatttgccaacaccattgccaatgacaaatttgcattgctatttgtgcgggccagttgcattcatgcaatttgcagcaagacaactattagaactagggataacagaaagtcaaatccattatgaatgctttggaccacacaaagtaatctga

SEQ ID NO: 261 - DNA, 12764 bp, Artificial
  pMON99286
cctaggcgcggatcccccaccctgcaatgtgaccctagacttgtccatcttctggattggccaacttaattaatgtatgaaataaaaggatgcacacatagtgacatgctaatcactataatgtgggcatcaaagttgtgtgttatgtgtaattactaattatctgaataagagaaagagatcatccatatttcttatcctaaatgaatgtcacgtgtctttataattctttgatgaaccagatgcattttattaaccaattccatatacatataaatattaatcatatataattaatatcaattgggttagcaaaacaaatctagtctaggtgtgttttgctaattattgggggatagtgcaaaaagaaatctacgttctcaataattcagatagaaaacttaataaagtgagataatttacatagattgcttttatcctttgatatatgtgaaaccatgcatgatataaggaaaatagatagagaaataattttttacatcgttgaatatgtaaacaatttaattcaagaagctaggaatataaatattgaggagtttatgattattattattattttgatgttcaatgaagttttttttaatttcatatgaagtatacaaaaattcttcatagatttttgtttctatgccgtagttatctttaatatatttgtggttgaagaaatttattgctagaaacgaatggattgtcaatttttttttaaagcaaatatatatgaaattatactgtatattattttagtcatgattaaaatgtggccttaattgaatcatctttctcattcattttttcaaaagcatatcaggatgattgatatttatctattttaaaaattaatttaagggttcaaattaaatttaacttaaaagtgtcctaaccgtagttaaaggtttactttaaaaaaatactatgaaaaatctaatcttctatgaatcgaccggatttagcttactcgaggtcattcatatgcttgagaagagagtcgggatagtccaaaataaaacaaaggtaagattacctggtcaaaagtgaaaacatcagttaaaaggtggtataaagtaaaatatcggtaataaaaggtggcccaaagtgaaatttactcttttctactattataaaaattgaggatgtttttgtcggtactttgatacgtcatttttgtatgaattggtttttaagtttattcgcttttggaaatgcatatctgtatttgagtcgggttttaagttcgtttgcttttgtaaatacagagggatttgtataagaaatatctttagaaaaacccatatgctaatttgacataatttttgagaaaaatatatattcaggcgaattctcacaatgaacaataataagattaaaatagctttcccccgttgcagcgcatgggtattttttctagtaaaaataaaagataaacttagactcaaaacatttacaaaaacaacccctaaagttcctaaagcccaaagtgctatccacgatccatagcaagcccagcccaacccaacccaacccaacccaccccagtccagccaactggacaatagtctccacacccccccactatcaccgtgagttgtccgcacgcaccgcacgtctcgcagccaaaaaaaaaaagaaagaaaaaaaagaaaaagaaaaaacagcaggtgggtccgggtcgtgggggccggaaacgcgaggaggatcgcgagccagcgacgaggccggccctccctccgcttccaaagaaacgccccccatcgccactatatacatacccccccctctcctcccatccccccaaccctaccaccaccaccaccaccacctccacctcctcccccctcgctgccggacgacgagctcctcccccctccccctccgccgccgccgcgccggtaaccaccccgcccctctcctctttctttctccgtttttttttccgtctcggtctcgatctttggccttggtagtttgggtgggcgagaggcggcttcgtgcgcgcccagatcggtgcgcgggaggggcgggatctcgcggctggggctctcgccggcgtggatccggcccggatctcgcggggaatggggctctcggatgtagatctgcgatccgccgttgttgggggagatgatggggggtttaaaatttccgccgtgctaaacaagatcaggaagaggggaaaagggcactatggtttatatttttatatatttctgctgcttcgtcaggcttagatgtgctagatctttctttcttctttttgtgggtagaatttgaatccctcagcattgttcatcggtagtttttcttttcatgatttgtgacaaatgcagcctcgtgcggagcttttttgtaggtagaagtgatcaaccatggcgcaagttagcagaatctgcaatggtgtgcagaacccatctcttatctccaatctctcgaaatccagtcaacgcaaatctcccttatcggtttctctgaagacgcagcagcatccacgagcttatccgatttcgtcgtcgtggggattgaagaagagtgggatgacgttaattggctctgagcttcgtcctcttaaggtcatgtcttctgtttccacggcgtgcatgcttcacggtgcaagcagccggcccgcaaccgcccgcaaatcctctggcctttccggaaccgtccgcattcccggcgacaagtcgatctcccaccggtccttcatgttcggcggtctcgcgagcggtgaaacgcgcatcaccggccttctggaaggcgaggacgtcatcaatacgggcaaggccatgcaggcgatgggcgcccgcatccgtaaggaaggcgacacctggatcatcgatggcgtcggcaatggcggcctcctggcgcctgaggcgccgctcgatttcggcaatgccgccacgggctgccgcctgacgatgggcctcgtcggggtctacgatttcgacagcaccttcatcggcgacgcctcgctcacaaagcgcccgatgggccgcgtgttgaacccgctgcgcgaaatgggcgtgcaggtgaaatcggaagacggtgaccgtcttcccgttaccttgcgcgggccgaagacgccgacgccgatcacctaccgcgtgccgatggcctccgcacaggtgaagtccgccgtgctgctcgccggcctcaacacgcccggcatcacgacggtcatcgagccgatcatgacgcgcgatcatacggaaaagatgctgcagggctttggcgccaaccttaccgtcgagacggatgcggacggcgtgcgcaccatccgcctggaaggccgcggcaagctcaccggccaagtcatcgacgtgccgggcgacccgtcctcgacggccttcccgctggttgcggccctgcttgttccgggctccgacgtcaccatcctcaacgtgctgatgaaccccacccgcaccggcctcatcctgacgctgcaggaaatgggcgccgacatcgaagtcatcaacccgcgccttgccggcggcgaagacgtggcggacctgcgcgttcgctcctccacgctgaagggcgtcacggtgccggaagaccgcgcgccttcgatgatcgacgaatatccgattctcgctgtcgccgccgccttcgcggaaggggcgaccgtgatgaacggtctggaagaactccgcgtcaaggaaagcgaccgcctctcggccgtcgccaatggcctcaagctcaatggcgtggattgcgatgagggcgagacgtcgctcgtcgtgcgtggccgccctgacggcaaggggctcggcaacgcctcgggcgccgccgtcgccacccatctcgatcaccgcatcgccatgagcttcctcgtcatgggcctcgtgtcggaaaaccctgtcacggtggacgatgccacgatgatcgccacgagcttcccggagttcatggacctgatggccgggctgggcgcgaagatcgaactctccgatacgaaggctgcctgatgagctcgaattcccgatcgttcaaacatttggcaataaagtttcttaagattgaatcctgttgccggtcttgcgatgattatcatataatttctgttgaattacgttaagcatgtaataattaacatgtaatgcatgacgttatttatgagatgggtttttatgattagagtcccgcaattatacatttaatacgcgatagaaaacaaaatatagcgcgcaaactaggataaattatcgcgcgcggtgtcatctatgttactagatcggggatgggggatccactagtgatatccgtcgactggtacctacgcgtagctagcccgggcgcgccttaattaagcggccgcatcgatcgtgaagtttctcatctaagcccccatttggacgtgaatgtagacacgtcgaaataaagatttccgaattagaataatttgtttattgctttcgcctataaatacgacggatcgtaatttgtcgttttatcaaaatgtactttcattttataataacgctgcggacatctacatttttgaattgaaaaaaaattggtaattactctttctttttctccatattgaccatcatactcattgctgatccatgtagatttcccggacatgaagccatttacaattgaatatatcctgccgccgctgccgctttgcacccggtggagcttgcatgttggtttctacgcagaactgagccggttaggcagataatttccattgagaactgagccatgtgcaccttccccccaacacggtgagcgacggggcaacggagtgatccacatgggacttttcctagcttggctgccatttttggggtgaggccgttcgcggccgaggggcgcagcccctggggggatgggaggcccgcgttagcgggccgggagggttcgagaagggggggcaccccccttcggcgtgcgcggtcacgcgcacagggcgcagccctggttaaaaacaaggtttataaatattggtttaaaagcaggttaaaagacaggttagcggtggccgaaaaacgggcggaaacccttgcaaatgctggattttctgcctgtggacagcccctcaaatgtcaataggtgcgcccctcatctgtcagcactctgcccctcaagtgtcaaggatcgcgcccctcatctgtcagtagtcgcgcccctcaagtgtcaataccgcagggcacttatccccaggcttgtccacatcatctgtgggaaactcgcgtaaaatcaggcgttttcgccgatttgcgaggctggccagctccacgtcgccggccgaaatcgagcctgcccctcatctgtcaacgccgcgccgggtgagtcggcccctcaagtgtcaacgtccgcccctcatctgtcagtgagggccaagttttccgcgaggtatccacaacgccggcggccggccgcggtgtctcgcacacggcttcgacggcgtttctggcgcgtttgcagggccatagacggccgccagcccagcggcgagggcaaccagcccggtgagcgtcggaaagggtcgatcgaccgatgcccttgagagccttcaacccagtcagctccttccggtgggcgcggggcatgactatcgtcgccgcacttatgactgtcttctttatcatgcaactcgtaggacaggtgccggcagcgctctgggtcattttcggcgaggaccgctttcgctggagcgcgacgatgatcggcctgtcgcttgcggtattcggaatcttgcacgccctcgctcaagccttcgtcactggtcccgccaccaaacgtttcggcgagaagcaggccattatcgccggcatggcggccgacgcgctgggctacgtcttgctggcgttcgcgacgcgaggctggatggccttccccattatgattcttctcgcttccggcggcatcgggatgcccgcgttgcaggccatgctgtccaggcaggtagatgacgaccatcagggacagcttcaaggatcgctcgcggctcttaccagcctaacttcgatcattggaccgctgatcgtcacggcgatttatgccgcctcggcgagcacatggaacgggttggcatggattgtaggcgccgccctataccttgtctgcctccccgcgttgcgtcgcggtgcatggagccgggccacctcgacctgaatggaagccggcggcacctcgctaacggattcaccactccaagaattggagccaatcaattcttgcggagaactgtgaatgcgcaaaccaacccttggcagaacatatccatcgcgtccgccatctccagcagccgcacgcggcgcatctcgggcagcgttgggtcctggccacgggtgcgcatgatcgtgctcctgtcgttgaggacccggctaggctggcggggttgccttactggttagcagaatgaatcaccgatacgcgagcgaacgtgaagcgactgctgctgcaaaacgtctgcgacctgagcaacaacatgaatggtcttcggtttccgtgtttcgtaaagtctggaaacgcggaagtcagcgccctgcaccattatgttccggatctgcatcgcaggatgctgctggctaccctgtggaacacctacatctgtattaacgaagcgctggcattgaccctgagtgatttttctctggtcccgccgcatccataccgccagttgtttaccctcacaacgttccagtaaccgggcatgttcatcatcagtaacccgtatcgtgagcatcctctctcgtttcatcggtatcattacccccatgaacagaaatcccccttacacggaggcatcagtgaccaaacaggaaaaaaccgcccttaacatggcccgctttatcagaagccagacattaacgcttctggagaaactcaacgagctggacgcggatgaacaggcagacatctgtgaatcgcttcacgaccacgctgatgagctttaccgcagctgcctcgcgcgtttcggtgatgacggtgaaaacctctgacacatgcagctcccggagacggtcacagcttgtctgtaagcggatgccgggagcagacaagcccgtcagggcgcgtcagcgggtgttggcgggtgtcggggcgcagccatgacccagtcacgtagcgatagcggagtgtatactggcttaactatgcggcatcagagcagattgtactgagagtgcaccatatgcggtgtgaaataccgcacagatgcgtaaggagaaaataccgcatcaggcgctcttccgcttcctcgctcactgactcgctgcgctcggtcgttcggctgcggcgagcggtatcagctcactcaaaggcggtaatacggttatccacagaatcaggggataacgcaggaaagaacatgtgagcaaaaggccagcaaaaggccaggaaccgtaaaaaggccgcgttgctggcgtttttccataggctccgcccccctgacgagcatcacaaaaatcgacgctcaagtcagaggtggcgaaacccgacaggactataaagataccaggcgtttccccctggaagctccctcgtgcgctctcctgttccgaccctgccgcttaccggatacctgtccgcctttctcccttcgggaagcgtggcgctttctcatagctcacgctgtaggtatctcagttcggtgtaggtcgttcgctccaagctgggctgtgtgcacgaaccccccgttcagcccgaccgctgcgccttatccggtaactatcgtcttgagtccaacccggtaagacacgacttatcgccactggcagcagccactggtaacaggattagcagagcgaggtatgtaggcggtgctacagagttcttgaagtggtggcctaactacggctacactagaaggacagtatttggtatctgcgctctgctgaagccagttaccttcggaaaaagagttggtagctcttgatccggcaaacaaaccaccgctggtagcggtggtttttttgtttgcaagcagcagattacgcgcagaaaaaaaggatctcaagaagatcctttgatcttttctacggggtctgacgctcagtggaacgaaaactcacgttaagggattttggtcatgagattatcaaaaaggatcttcacctagatccttttaaattaaaaatgaagttttaaatcaatctaaagtatatatgagtaaacttggtctgacagttaccaatgcttaatcagtgaggcacctatctcagcgatctgtctatttcgttcatccatagttgcctgactccccgtcgtgtagataactacgatacgggagggcttaccatctggccccagtgctgcaatgataccgcgagacccacgctcaccggctccagatttatcagcaataaaccagccagccggaagggccgagcgcagaagtggtcctgcaactttatccgcctccatccagtctattaattgttgccgggaagctagagtaagtagttcgccagttaatagtttgcgcaacgttgttgccattgctgcaggtcgggagcacaggatgacgcctaacaattcattcaagccgacaccgcttcgcggcgcggcttaattcaggagttaaacatcatgagggaagcggtgatcgccgaagtatcgactcaactatcagaggtagttggcgtcatcgagcgccatctcgaaccgacgttgctggccgtacatttgtacggctccgcagtggatggcggcctgaagccacacagtgatattgatttgctggttacggtgaccgtaaggcttgatgaaacaacgcggcgagctttgatcaacgaccttttggaaacttcggcttcccctggagagagcgagattctccgcgctgtagaagtcaccattgttgtgcacgacgacatcattccgtggcgttatccagctaagcgcgaactgcaatttggagaatggcagcgcaatgacattcttgcaggtatcttcgagccagccacgatcgacattgatctggctatcttgctgacaaaagcaagagaacatagcgttgccttggtaggtccagcggcggaggaactctttgatccggttcctgaacaggatctatttgaggcgctaaatgaaaccttaacgctatggaactcgccgcccgactgggctggcgatgagcgaaatgtagtgcttacgttgtcccgcatttggtacagcgcagtaaccggcaaaatcgcgccgaaggatgtcgctgccgactgggcaatggagcgcctgccggcccagtatcagcccgtcatacttgaagctaggcaggcttatcttggacaagaagatcgcttggcctcgcgcgcagatcagttggaagaatttgttcactacgtgaaaggcgagatcaccaaggtagtcggcaaataatgtctaacaattcgttcaagccgacgccgcttcgcggcgcggcttaactcaagcgttagatgctgcaggcatcgtggtgtcacgctcgtcgtttggtatggcttcattcagctccggttcccaacgatcaaggcgagttacatgatcccccatgttgtgcaaaaaagcggttagctccttcggtcctccgatcgaggatttttcggcgctgcgctacgtccgcgaccgcgttgagggatcaagccacagcagcccactcgaccttctagccgacccagacgagccaagggatctttttggaatgctgctccgtcgtcaggctttccgacgtttgggtggttgaacagaagtcattatcgcacggaatgccaagcactcccgaggggaaccctgtggttggcatgcacatacaaatggacgaacggataaaccttttcacgcccttttaaatatccgattattctaataaacgctcttttctcttaggtttacccgccaatatatcctgtcaaacactgatagtttaaactgaaggcgggaaacgacaatctggcgcgccgctagcctgcagggatctcctacaaaagggagtagtaatatttaatgagcttgaaggaggatatcaactctctccaaggtttattggagacctttatgctcatggttttattaaacaaataaacttcacaaccaaggttcctgaagggctaccgccaatcatagcggaaaaacttcaagactataagttccctggatcaaataccgtcttaatagaacgagagattcctcgctggaacttcaatgaaatgaaaagagaaacacagatgaggaccaacttatatatcttcaagaattatcgctgtttctatggctattcaccattaaggccatacgaacctataactcctgaagaatttgggtttgattactacagttgggaaaatatggttgatgaagacgaaggagaagttgtatacatctccaagtatactaagattatcaaagtcactaaagagcatgcatgggcttggccagaacatgatggagacacaatgtcctgcaccacatcaatagaagatgaatggatccatcgtatggacaatgcttaaagaagctttatcaaaagcaactttaagtacgaatcaataaagaaggaccagaagatataaagcgggaacatcttcacatgctaccacatggctagcatctttactttagcatctctattattgtaagagtgtataatgaccagtgtgcccctggactccagtatataaggagcaccagagtagtgtaatagatcatcgatcaagcaagcgagacgtcaaacttctaagagagcctgcaggaccaggtgggcccaccgtcttcggtacgcgctcactccgccctctgcctttgttactgccacgtttctctgaatgctctcttgtgtggtgattgctgagagtggtttagctggatctagaattacactctgaaatcgtgttctgcctgtgctgattacttgccgtcctttgtagcagcaaaatatagggacatggtagtacgaaacgaagatagaacctacacagcaatacgagaaatgtgtaatttggtgcttagcggtatttatttaagcacatgttggtgttatagggcacttggattcagaagtttgctgttaatttaggcacaggcttcatactacatgggtcaatagtatagggattcatattataggcgatactataataatttgttcgtctgcagagcttattatttgccaaaattagatattcctattctgtttttgtttgtgtgctgttaaattgttaacgcctgaaggaataaatataaatgacgaaattttgatgtttatctctgctcctttattgtgaccataagtcaagatcagatgcacttgttttaaatattgttgtctgaagaaataagtactgacagtattttgatgcattgatctgcttgtttgttgtaacaaaatttaaaaataaagagtttcctttttgttgctctccttacctcctgatggtatctagtatctaccaactgacactatattgcttctctttacatacgtatcttgctcgatgccttctccctagtgttgaccagtgttactcacatagtctttgctcatttcattgtaatgcagataccaagcgggagctcgacgtccctcagcagtcgctgtgcgataccatgctagacgcccagaccatcgccaccgttaaggccaccatccccttgctagtggagaccggccctaagctgaccgcccacttctacgaccgcatgttcacccacaaccctgagctgaaggagattttcaacatgagcaaccagcgtaacggcgaccagcgcgaggccctcttcaacgccatcgccgcttacgcctccaacatcgagaacctccccgccctcctgcccgccgtggagaagatcgcccagaagcacacctccttccagatcaagcccgagcagtacaacatcgtgggcgagcacctcctggccaccctcgacgagatgttctcccctggccaggaggtgctcgacgcctggggcaaggcctacggcgtgctcgccaacgtgttcatcaaccgcgaggccgaaatctacaacgagaacgctagcaaggctggcggttgggagggcacccgcgacttcaggattgtggctaagactcccaggtccgctctcattactagcttcgagctggagcccgtggacggcggtgctgtggctgagtaccgtcctggccagtacctcggcgtgtggctcaagcctgagggcttcccgcaccaggagattaggcagtattctctcactaggaagccggacggcaagggctaccggattgctgtgaagcgggaggaaggtgggcaggtctctaactggctgcacaatcacgctaatgtcggtgacgtcgttaagctggtcgctccggctggtgacttctttatggctgtcgcggacgatactccggtcactctgataagtgcgggtgtcggtcagacgccgatgctggcgatgctggacacgcttgcgaaggcggggcacacggcgcaggtcaattggttccacgcggcagagaatggggatgtccatgcgttcgcggatgaggttaaggagcttgggcagtctcttccaagattcacggcacatacctggtacagacagccatcggaagcagatcgagcaaaggggcagttcgattcggaagggcttatggatctttcaaagttagaaggagcattttcagatccaacaatgcaattttatctttgcggaccagttggattcatgcaattcacagcaaaacaacttgttgatttgggagttaaacaagaaaacatacactatgaatgctttggaccacataaggtattgtagatcgccagcggtactcgctgagg

SEQ ID NO: 262 - DNA, 14095 bp, Artificial
  pMON99261
cctaggcgcggatcccccaccctgcaatgtgaccctagacttgtccatcttctggattggccaacttaattaatgtatgaaataaaaggatgcacacatagtgacatgctaatcactataatgtgggcatcaaagttgtgtgttatgtgtaattactaattatctgaataagagaaagagatcatccatatttcttatcctaaatgaatgtcacgtgtctttataattctttgatgaaccagatgcattttattaaccaattccatatacatataaatattaatcatatataattaatatcaattgggttagcaaaacaaatctagtctaggtgtgttttgctaattattgggggatagtgcaaaaagaaatctacgttctcaataattcagatagaaaacttaataaagtgagataatttacatagattgcttttatcctttgatatatgtgaaaccatgcatgatataaggaaaatagatagagaaataattttttacatcgttgaatatgtaaacaatttaattcaagaagctaggaatataaatattgaggagtttatgattattattattattttgatgttcaatgaagttttttttaatttcatatgaagtatacaaaaattcttcatagatttttgtttctatgccgtagttatctttaatatatttgtggttgaagaaatttattgctagaaacgaatggattgtcaatttttttttaaagcaaatatatatgaaattatactgtatattattttagtcatgattaaaatgtggccttaattgaatcatctttctcattcattttttcaaaagcatatcaggatgattgatatttatctattttaaaaattaatttaagggttcaaattaaatttaacttaaaagtgtcctaaccgtagttaaaggtttactttaaaaaaatactatgaaaaatctaatcttctatgaatcgaccggatttagcttactcgaggtcattcatatgcttgagaagagagtcgggatagtccaaaataaaacaaaggtaagattacctggtcaaaagtgaaaacatcagttaaaaggtggtataaagtaaaatatcggtaataaaaggtggcccaaagtgaaatttactcttttctactattataaaaattgaggatgtttttgtcggtactttgatacgtcatttttgtatgaattggtttttaagtttattcgcttttggaaatgcatatctgtatttgagtcgggttttaagttcgtttgcttttgtaaatacagagggatttgtataagaaatatctttagaaaaacccatatgctaatttgacataatttttgagaaaaatatatattcaggcgaattctcacaatgaacaataataagattaaaatagctttcccccgttgcagcgcatgggtattttttctagtaaaaataaaagataaacttagactcaaaacatttacaaaaacaacccctaaagttcctaaagcccaaagtgctatccacgatccatagcaagcccagcccaacccaacccaacccaacccaccccagtccagccaactggacaatagtctccacacccccccactatcaccgtgagttgtccgcacgcaccgcacgtctcgcagccaaaaaaaaaaagaaagaaaaaaaagaaaaagaaaaaacagcaggtgggtccgggtcgtgggggccggaaacgcgaggaggatcgcgagccagcgacgaggccggccctccctccgcttccaaagaaacgccccccatcgccactatatacatacccccccctctcctcccatccccccaaccctaccaccaccaccaccaccacctccacctcctcccccctcgctgccggacgacgagctcctcccccctccccctccgccgccgccgcgccggtaaccaccccgcccctctcctctttctttctccgtttttttttccgtctcggtctcgatctttggccttggtagtttgggtgggcgagaggcggcttcgtgcgcgcccagatcggtgcgcgggaggggcgggatctcgcggctggggctctcgccggcgtggatccggcccggatctcgcggggaatggggctctcggatgtagatctgcgatccgccgttgttgggggagatgatggggggtttaaaatttccgccgtgctaaacaagatcaggaagaggggaaaagggcactatggtttatatttttatatatttctgctgcttcgtcaggcttagatgtgctagatctttctttcttctttttgtgggtagaatttgaatccctcagcattgttcatcggtagtttttcttttcatgatttgtgacaaatgcagcctcgtgcggagcttttttgtaggtagaagtgatcaaccatggcgcaagttagcagaatctgcaatggtgtgcagaacccatctcttatctccaatctctcgaaatccagtcaacgcaaatctcccttatcggtttctctgaagacgcagcagcatccacgagcttatccgatttcgtcgtcgtggggattgaagaagagtgggatgacgttaattggctctgagcttcgtcctcttaaggtcatgtcttctgtttccacggcgtgcatgcttcacggtgcaagcagccggcccgcaaccgcccgcaaatcctctggcctttccggaaccgtccgcattcccggcgacaagtcgatctcccaccggtccttcatgttcggcggtctcgcgagcggtgaaacgcgcatcaccggccttctggaaggcgaggacgtcatcaatacgggcaaggccatgcaggcgatgggcgcccgcatccgtaaggaaggcgacacctggatcatcgatggcgtcggcaatggcggcctcctggcgcctgaggcgccgctcgatttcggcaatgccgccacgggctgccgcctgacgatgggcctcgtcggggtctacgatttcgacagcaccttcatcggcgacgcctcgctcacaaagcgcccgatgggccgcgtgttgaacccgctgcgcgaaatgggcgtgcaggtgaaatcggaagacggtgaccgtcttcccgttaccttgcgcgggccgaagacgccgacgccgatcacctaccgcgtgccgatggcctccgcacaggtgaagtccgccgtgctgctcgccggcctcaacacgcccggcatcacgacggtcatcgagccgatcatgacgcgcgatcatacggaaaagatgctgcagggctttggcgccaaccttaccgtcgagacggatgcggacggcgtgcgcaccatccgcctggaaggccgcggcaagctcaccggccaagtcatcgacgtgccgggcgacccgtcctcgacggccttcccgctggttgcggccctgcttgttccgggctccgacgtcaccatcctcaacgtgctgatgaaccccacccgcaccggcctcatcctgacgctgcaggaaatgggcgccgacatcgaagtcatcaacccgcgccttgccggcggcgaagacgtggcggacctgcgcgttcgctcctccacgctgaagggcgtcacggtgccggaagaccgcgcgccttcgatgatcgacgaatatccgattctcgctgtcgccgccgccttcgcggaaggggcgaccgtgatgaacggtctggaagaactccgcgtcaaggaaagcgaccgcctctcggccgtcgccaatggcctcaagctcaatggcgtggattgcgatgagggcgagacgtcgctcgtcgtgcgtggccgccctgacggcaaggggctcggcaacgcctcgggcgccgccgtcgccacccatctcgatcaccgcatcgccatgagcttcctcgtcatgggcctcgtgtcggaaaaccctgtcacggtggacgatgccacgatgatcgccacgagcttcccggagttcatggacctgatggccgggctgggcgcgaagatcgaactctccgatacgaaggctgcctgatgagctcgaattcccgatcgttcaaacatttggcaataaagtttcttaagattgaatcctgttgccggtcttgcgatgattatcatataatttctgttgaattacgttaagcatgtaataattaacatgtaatgcatgacgttatttatgagatgggtttttatgattagagtcccgcaattatacatttaatacgcgatagaaaacaaaatatagcgcgcaaactaggataaattatcgcgcgcggtgtcatctatgttactagatcggggatgggggatccactagtgatatccgtcgactggtacctacgcgtagctagcccgggcgcgccttaattaagcggccgcatcgatcgtgaagtttctcatctaagcccccatttggacgtgaatgtagacacgtcgaaataaagatttccgaattagaataatttgtttattgctttcgcctataaatacgacggatcgtaatttgtcgttttatcaaaatgtactttcattttataataacgctgcggacatctacatttttgaattgaaaaaaaattggtaattactctttctttttctccatattgaccatcatactcattgctgatccatgtagatttcccggacatgaagccatttacaattgaatatatcctgccgccgctgccgctttgcacccggtggagcttgcatgttggtttctacgcagaactgagccggttaggcagataatttccattgagaactgagccatgtgcaccttccccccaacacggtgagcgacggggcaacggagtgatccacatgggacttttcctagcttggctgccatttttggggtgaggccgttcgcggccgaggggcgcagcccctggggggatgggaggcccgcgttagcgggccgggagggttcgagaagggggggcaccccccttcggcgtgcgcggtcacgcgcacagggcgcagccctggttaaaaacaaggtttataaatattggtttaaaagcaggttaaaagacaggttagcggtggccgaaaaacgggcggaaacccttgcaaatgctggattttctgcctgtggacagcccctcaaatgtcaataggtgcgcccctcatctgtcagcactctgcccctcaagtgtcaaggatcgcgcccctcatctgtcagtagtcgcgcccctcaagtgtcaataccgcagggcacttatccccaggcttgtccacatcatctgtgggaaactcgcgtaaaatcaggcgttttcgccgatttgcgaggctggccagctccacgtcgccggccgaaatcgagcctgcccctcatctgtcaacgccgcgccgggtgagtcggcccctcaagtgtcaacgtccgcccctcatctgtcagtgagggccaagttttccgcgaggtatccacaacgccggcggccggccgcggtgtctcgcacacggcttcgacggcgtttctggcgcgtttgcagggccatagacggccgccagcccagcggcgagggcaaccagcccggtgagcgtcggaaagggtcgatcgaccgatgcccttgagagccttcaacccagtcagctccttccggtgggcgcggggcatgactatcgtcgccgcacttatgactgtcttctttatcatgcaactcgtaggacaggtgccggcagcgctctgggtcattttcggcgaggaccgctttcgctggagcgcgacgatgatcggcctgtcgcttgcggtattcggaatcttgcacgccctcgctcaagccttcgtcactggtcccgccaccaaacgtttcggcgagaagcaggccattatcgccggcatggcggccgacgcgctgggctacgtcttgctggcgttcgcgacgcgaggctggatggccttccccattatgattcttctcgcttccggcggcatcgggatgcccgcgttgcaggccatgctgtccaggcaggtagatgacgaccatcagggacagcttcaaggatcgctcgcggctcttaccagcctaacttcgatcattggaccgctgatcgtcacggcgatttatgccgcctcggcgagcacatggaacgggttggcatggattgtaggcgccgccctataccttgtctgcctccccgcgttgcgtcgcggtgcatggagccgggccacctcgacctgaatggaagccggcggcacctcgctaacggattcaccactccaagaattggagccaatcaattcttgcggagaactgtgaatgcgcaaaccaacccttggcagaacatatccatcgcgtccgccatctccagcagccgcacgcggcgcatctcgggcagcgttgggtcctggccacgggtgcgcatgatcgtgctcctgtcgttgaggacccggctaggctggcggggttgccttactggttagcagaatgaatcaccgatacgcgagcgaacgtgaagcgactgctgctgcaaaacgtctgcgacctgagcaacaacatgaatggtcttcggtttccgtgtttcgtaaagtctggaaacgcggaagtcagcgccctgcaccattatgttccggatctgcatcgcaggatgctgctggctaccctgtggaacacctacatctgtattaacgaagcgctggcattgaccctgagtgatttttctctggtcccgccgcatccataccgccagttgtttaccctcacaacgttccagtaaccgggcatgttcatcatcagtaacccgtatcgtgagcatcctctctcgtttcatcggtatcattacccccatgaacagaaatcccccttacacggaggcatcagtgaccaaacaggaaaaaaccgcccttaacatggcccgctttatcagaagccagacattaacgcttctggagaaactcaacgagctggacgcggatgaacaggcagacatctgtgaatcgcttcacgaccacgctgatgagctttaccgcagctgcctcgcgcgtttcggtgatgacggtgaaaacctctgacacatgcagctcccggagacggtcacagcttgtctgtaagcggatgccgggagcagacaagcccgtcagggcgcgtcagcgggtgttggcgggtgtcggggcgcagccatgacccagtcacgtagcgatagcggagtgtatactggcttaactatgcggcatcagagcagattgtactgagagtgcaccatatgcggtgtgaaataccgcacagatgcgtaaggagaaaataccgcatcaggcgctcttccgcttcctcgctcactgactcgctgcgctcggtcgttcggctgcggcgagcggtatcagctcactcaaaggcggtaatacggttatccacagaatcaggggataacgcaggaaagaacatgtgagcaaaaggccagcaaaaggccaggaaccgtaaaaaggccgcgttgctggcgtttttccataggctccgcccccctgacgagcatcacaaaaatcgacgctcaagtcagaggtggcgaaacccgacaggactataaagataccaggcgtttccccctggaagctccctcgtgcgctctcctgttccgaccctgccgcttaccggatacctgtccgcctttctcccttcgggaagcgtggcgctttctcatagctcacgctgtaggtatctcagttcggtgtaggtcgttcgctccaagctgggctgtgtgcacgaaccccccgttcagcccgaccgctgcgccttatccggtaactatcgtcttgagtccaacccggtaagacacgacttatcgccactggcagcagccactggtaacaggattagcagagcgaggtatgtaggcggtgctacagagttcttgaagtggtggcctaactacggctacactagaaggacagtatttggtatctgcgctctgctgaagccagttaccttcggaaaaagagttggtagctcttgatccggcaaacaaaccaccgctggtagcggtggtttttttgtttgcaagcagcagattacgcgcagaaaaaaaggatctcaagaagatcctttgatcttttctacggggtctgacgctcagtggaacgaaaactcacgttaagggattttggtcatgagattatcaaaaaggatcttcacctagatccttttaaattaaaaatgaagttttaaatcaatctaaagtatatatgagtaaacttggtctgacagttaccaatgcttaatcagtgaggcacctatctcagcgatctgtctatttcgttcatccatagttgcctgactccccgtcgtgtagataactacgatacgggagggcttaccatctggccccagtgctgcaatgataccgcgagacccacgctcaccggctccagatttatcagcaataaaccagccagccggaagggccgagcgcagaagtggtcctgcaactttatccgcctccatccagtctattaattgttgccgggaagctagagtaagtagttcgccagttaatagtttgcgcaacgttgttgccattgctgcaggtcgggagcacaggatgacgcctaacaattcattcaagccgacaccgcttcgcggcgcggcttaattcaggagttaaacatcatgagggaagcggtgatcgccgaagtatcgactcaactatcagaggtagttggcgtcatcgagcgccatctcgaaccgacgttgctggccgtacatttgtacggctccgcagtggatggcggcctgaagccacacagtgatattgatttgctggttacggtgaccgtaaggcttgatgaaacaacgcggcgagctttgatcaacgaccttttggaaacttcggcttcccctggagagagcgagattctccgcgctgtagaagtcaccattgttgtgcacgacgacatcattccgtggcgttatccagctaagcgcgaactgcaatttggagaatggcagcgcaatgacattcttgcaggtatcttcgagccagccacgatcgacattgatctggctatcttgctgacaaaagcaagagaacatagcgttgccttggtaggtccagcggcggaggaactctttgatccggttcctgaacaggatctatttgaggcgctaaatgaaaccttaacgctatggaactcgccgcccgactgggctggcgatgagcgaaatgtagtgcttacgttgtcccgcatttggtacagcgcagtaaccggcaaaatcgcgccgaaggatgtcgctgccgactgggcaatggagcgcctgccggcccagtatcagcccgtcatacttgaagctaggcaggcttatcttggacaagaagatcgcttggcctcgcgcgcagatcagttggaagaatttgttcactacgtgaaaggcgagatcaccaaggtagtcggcaaataatgtctaacaattcgttcaagccgacgccgcttcgcggcgcggcttaactcaagcgttagatgctgcaggcatcgtggtgtcacgctcgtcgtttggtatggcttcattcagctccggttcccaacgatcaaggcgagttacatgatcccccatgttgtgcaaaaaagcggttagctccttcggtcctccgatcgaggatttttcggcgctgcgctacgtccgcgaccgcgttgagggatcaagccacagcagcccactcgaccttctagccgacccagacgagccaagggatctttttggaatgctgctccgtcgtcaggctttccgacgtttgggtggttgaacagaagtcattatcgcacggaatgccaagcactcccgaggggaaccctgtggttggcatgcacatacaaatggacgaacggataaaccttttcacgcccttttaaatatccgattattctaataaacgctcttttctcttaggtttacccgccaatatatcctgtcaaacactgatagtttaaactgaaggcgggaaacgacaatctggcgcgccgctagcctgcaggcatgtgctggtgccccataaggtaggcacctaggtctgtgtttgaagcatcgacagatttgtaaacatgttcctatgaacctatttctgattgataatttgtcaaaactcatcatttgtcttcatccttgcctgcttgcgttcacgtgacaaagtacgtgtatgtcttcggcctttgctgtgtatgtttcgcattgcttagatgtggtgaaagaacatcagaagatgcattgatggcgtgcttaaaccagtgatgtgctccaggtgttcctgcagtctgcagagatatttactcttgtagtcttgttgacagcacagttgtatgtgatttcttggatgtaatgtaaaccaaatgaaagataggaacagttcgtcctcttccgtatacgaaggtcactgtatcatttgtcgtggcacaagatgatctgcaggcaggactgcaacatggtttcttggactgtcctgaatgcccgttcttgttctttagttgagccagagcagcagcctggtgtcggtgcctgagacctgacgaagcacacggcaaacaaacaagtcgcagcagctagcaggggcgttgccatcgccacaagcccccaagagacccgccgaggaaaagaaaaaaaaactacggccgccgttgccaagccgagcgtgcgaaccgatccacggatgggagatcagagatcacccaccgcaggcgggcggcagtggctggcgaggtgcgtccacagaacctgctgcaggtccctgtccgtcccggcgaccccttttctaggcgagcaactccccatggcagagctgcacgcagcagggcccgtcgttggttgcagctttaaccctttttgttttaaccatacaatgcagagtcgcagaggtgaaacaggacggaaattacagaaaagatggtggtgtgccagcagccccagcatgaagaagatcaggacaaaagaaaagcttgtgattggtgacagcaacaggattggattggagccaagctaggcagtgagaggcaggcagcaagacgcgtcagccactgaaatccagagggcaacctcggcctcacaactcatatccccttgtgctgttgcgcgccgtggttagccaggtgtgctgcagggggtaccatggcatgcatcgatagatctcgagggatccaaagacatggaggtggaaggcctgacgtagatagagaagatgctcttagctttcattgtctttcttttgtagtcatctgatttacctctctcgtttatacaactggttttttaaacactccttaacttttcaaattgtctctttctttaccctagactagataattttaatggtgattttgctaatgtggcgccatgttagatagaggtaaaatgaactagttaaaagctcagagtgataaatcaggctctcaaaaattcataaactgttttttaaatatccaaatatttttacatggaaaataataaaatttagtttagtattaaaaaattcagttgaatatagttttgtcttcaaaaattatgaaactgatcttaattatttttccttaaaaccgtgctctatctttgatgtctagtttgagacgattatataattttttttgtgcttaactacgacgagctgaagtacgtagaaatactagtggagtcgtgccgcgtgtgcctgtagccactcgtacgctacagcccaagcgctagagcccaagaggccggaggtggaaggcgtcgcggcactatagccactcgccgcaagagcccaagagaccggagctggaaggatgagggtctgggtgttcacgaattgcctggaggcaggaggctcgtcgtccggagccacaggcgtggagacgtccgggataaggtgagcagccgctgcgataggggcgcgtgtgaaccccgtcgcgccccacggatggtataagaataaaggcattccgcgtgcaggattcacccgttcgcctctcaccttttcgctgtactcactcgccacacacaccccctctccagctccgttggagctccggacagcagcaggcgcggggcggtcacgtagtaagcagctctcggctccctctccccttgctccatttgatagtgcaacccatcgagctacaccggtgcggcccaccgtcttcggtacgcgctcactccgccctctgcctttgttactgccacgtttctctgaatgctctcttgtgtggtgattgctgagagtggtttagctggatctagaattacactctgaaatcgtgttctgcctgtgctgattacttgccgtcctttgtagcagcaaaatatagggacatggtagtacgaaacgaagatagaacctacacagcaatacgagaaatgtgtaatttggtgcttagcggtatttatttaagcacatgttggtgttatagggcacttggattcagaagtttgctgttaatttaggcacaggcttcatactacatgggtcaatagtatagggattcatattataggcgatactataataatttgttcgtctgcagagcttattatttgccaaaattagatattcctattctgtttttgtttgtgtgctgttaaattgttaacgcctgaaggaataaatataaatgacgaaattttgatgtttatctctgctcctttattgtgaccataagtcaagatcagatgcacttgttttaaatattgttgtctgaagaaataagtactgacagtattttgatgcattgatctgcttgtttgttgtaacaaaatttaaaaataaagagtttcctttttgttgctctccttacctcctgatggtatctagtatctaccaactgacactatattgcttctctttacatacgtatcttgctcgatgccttctccctagtgttgaccagtgttactcacatagtctttgctcatttcattgtaatgcagataccaagcgggagctcgacgtccctcagcagtcgctgtgcgataccatgctagacgcccagaccatcgccaccgttaaggccaccatccccttgctagtggagaccggccctaagctgaccgcccacttctacgaccgcatgttcacccacaaccctgagctgaaggagattttcaacatgagcaaccagcgtaacggcgaccagcgcgaggccctcttcaacgccatcgccgcttacgcctccaacatcgagaacctccccgccctcctgcccgccgtggagaagatcgcccagaagcacacctccttccagatcaagcccgagcagtacaacatcgtgggcgagcacctcctggccaccctcgacgagatgttctcccctggccaggaggtgctcgacgcctggggcaaggcctacggcgtgctcgccaacgtgttcatcaaccgcgaggccgaaatctacaacgagaacgctagcaaggctggcggttgggagggcacccgcgacttcaggattgtggctaagactcccaggtccgctctcattactagcttcgagctggagcccgtggacggcggtgctgtggctgagtaccgtcctggccagtacctcggcgtgtggctcaagcctgagggcttcccgcaccaggagattaggcagtattctctcactaggaagccggacggcaagggctaccggattgctgtgaagcgggaggaaggtgggcaggtctctaactggctgcacaatcacgctaatgtcggtgacgtcgttaagctggtcgctccggctggtgacttctttatggctgtcgcggacgatactccggtcactctgataagtgcgggtgtcggtcagacgccgatgctggcgatgctggacacgcttgcgaaggcggggcacacggcgcaggtcaattggttccacgcggcagagaatggggatgtccatgcgttcgcggatgaggttaaggagcttgggcagtctcttccaagattcacggcacatacctggtacagacagccatcggaagcagatcgagcaaaggggcagttcgattcggaagggcttatggatctttcaaagttagaaggagcattttcagatccaacaatgcaattttatctttgcggaccagttggattcatgcaattcacagcaaaacaacttgttgatttgggagttaaacaagaaaacatacactatgaatgctttggaccacataaggtattgtagatcgccagcggtactcgctgagg

SEQ ID NO: 263 - DNA, 12636 bp, Artificial
  pMON99276
cctaggcgcggatcccccaccctgcaatgtgaccctagacttgtccatcttctggattggccaacttaattaatgtatgaaataaaaggatgcacacatagtgacatgctaatcactataatgtgggcatcaaagttgtgtgttatgtgtaattactaattatctgaataagagaaagagatcatccatatttcttatcctaaatgaatgtcacgtgtctttataattctttgatgaaccagatgcattttattaaccaattccatatacatataaatattaatcatatataattaatatcaattgggttagcaaaacaaatctagtctaggtgtgttttgctaattattgggggatagtgcaaaaagaaatctacgttctcaataattcagatagaaaacttaataaagtgagataatttacatagattgcttttatcctttgatatatgtgaaaccatgcatgatataaggaaaatagatagagaaataattttttacatcgttgaatatgtaaacaatttaattcaagaagctaggaatataaatattgaggagtttatgattattattattattttgatgttcaatgaagttttttttaatttcatatgaagtatacaaaaattcttcatagatttttgtttctatgccgtagttatctttaatatatttgtggttgaagaaatttattgctagaaacgaatggattgtcaatttttttttaaagcaaatatatatgaaattatactgtatattattttagtcatgattaaaatgtggccttaattgaatcatctttctcattcattttttcaaaagcatatcaggatgattgatatttatctattttaaaaattaatttaagggttcaaattaaatttaacttaaaagtgtcctaaccgtagttaaaggtttactttaaaaaaatactatgaaaaatctaatcttctatgaatcgaccggatttaaatccatcgttctggggcctaacgggccaagcttactcgaggtcattcatatgcttgagaagagagtcgggatagtccaaaataaaacaaaggtaagattacctggtcaaaagtgaaaacatcagttaaaaggtggtataaagtaaaatatcggtaataaaaggtggcccaaagtgaaatttactcttttctactattataaaaattgaggatgtttttgtcggtactttgatacgtcatttttgtatgaattggtttttaagtttattcgcttttggaaatgcatatctgtatttgagtcgggttttaagttcgtttgcttttgtaaatacagagggatttgtataagaaatatctttagaaaaacccatatgctaatttgacataatttttgagaaaaatatatattcaggcgaattctcacaatgaacaataataagattaaaatagctttcccccgttgcagcgcatgggtattttttctagtaaaaataaaagataaacttagactcaaaacatttacaaaaacaacccctaaagttcctaaagcccaaagtgctatccacgatccatagcaagcccagcccaacccaacccaacccaacccaccccagtccagccaactggacaatagtctccacacccccccactatcaccgtgagttgtccgcacgcaccgcacgtctcgcagccaaaaaaaaaaagaaagaaaaaaaagaaaaagaaaaaacagcaggtgggtccgggtcgtgggggccggaaacgcgaggaggatcgcgagccagcgacgaggccggccctccctccgcttccaaagaaacgccccccatcgccactatatacatacccccccctctcctcccatccccccaaccctaccaccaccaccaccaccacctccacctcctcccccctcgctgccggacgacgagctcctcccccctccccctccgccgccgccgcgccggtaaccaccccgcccctctcctctttctttctccgtttttttttccgtctcggtctcgatctttggccttggtagtttgggtgggcgagaggcggcttcgtgcgcgcccagatcggtgcgcgggaggggcgggatctcgcggctggggctctcgccggcgtggatccggcccggatctcgcggggaatggggctctcggatgtagatctgcgatccgccgttgttgggggagatgatggggggtttaaaatttccgccgtgctaaacaagatcaggaagaggggaaaagggcactatggtttatatttttatatatttctgctgcttcgtcaggcttagatgtgctagatctttctttcttctttttgtgggtagaatttgaatccctcagcattgttcatcggtagtttttcttttcatgatttgtgacaaatgcagcctcgtgcggagcttttttgtaggtagaagtgatcaaccatggcgcaagttagcagaatctgcaatggtgtgcagaacccatctcttatctccaatctctcgaaatccagtcaacgcaaatctcccttatcggtttctctgaagacgcagcagcatccacgagcttatccgatttcgtcgtcgtggggattgaagaagagtgggatgacgttaattggctctgagcttcgtcctcttaaggtcatgtcttctgtttccacggcgtgcatgcttcacggtgcaagcagccggcccgcaaccgcccgcaaatcctctggcctttccggaaccgtccgcattcccggcgacaagtcgatctcccaccggtccttcatgttcggcggtctcgcgagcggtgaaacgcgcatcaccggccttctggaaggcgaggacgtcatcaatacgggcaaggccatgcaggcgatgggcgcccgcatccgtaaggaaggcgacacctggatcatcgatggcgtcggcaatggcggcctcctggcgcctgaggcgccgctcgatttcggcaatgccgccacgggctgccgcctgacgatgggcctcgtcggggtctacgatttcgacagcaccttcatcggcgacgcctcgctcacaaagcgcccgatgggccgcgtgttgaacccgctgcgcgaaatgggcgtgcaggtgaaatcggaagacggtgaccgtcttcccgttaccttgcgcgggccgaagacgccgacgccgatcacctaccgcgtgccgatggcctccgcacaggtgaagtccgccgtgctgctcgccggcctcaacacgcccggcatcacgacggtcatcgagccgatcatgacgcgcgatcatacggaaaagatgctgcagggctttggcgccaaccttaccgtcgagacggatgcggacggcgtgcgcaccatccgcctggaaggccgcggcaagctcaccggccaagtcatcgacgtgccgggcgacccgtcctcgacggccttcccgctggttgcggccctgcttgttccgggctccgacgtcaccatcctcaacgtgctgatgaaccccacccgcaccggcctcatcctgacgctgcaggaaatgggcgccgacatcgaagtcatcaacccgcgccttgccggcggcgaagacgtggcggacctgcgcgttcgctcctccacgctgaagggcgtcacggtgccggaagaccgcgcgccttcgatgatcgacgaatatccgattctcgctgtcgccgccgccttcgcggaaggggcgaccgtgatgaacggtctggaagaactccgcgtcaaggaaagcgaccgcctctcggccgtcgccaatggcctcaagctcaatggcgtggattgcgatgagggcgagacgtcgctcgtcgtgcgtggccgccctgacggcaaggggctcggcaacgcctcgggcgccgccgtcgccacccatctcgatcaccgcatcgccatgagcttcctcgtcatgggcctcgtgtcggaaaaccctgtcacggtggacgatgccacgatgatcgccacgagcttcccggagttcatggacctgatggccgggctgggcgcgaagatcgaactctccgatacgaaggctgcctgatgagctcgaattcccgatcgttcaaacatttggcaataaagtttcttaagattgaatcctgttgccggtcttgcgatgattatcatataatttctgttgaattacgttaagcatgtaataattaacatgtaatgcatgacgttatttatgagatgggtttttatgattagagtcccgcaattatacatttaatacgcgatagaaaacaaaatatagcgcgcaaactaggataaattatcgcgcgcggtgtcatctatgttactagatcggggatgggggatccactagtgatatccgtcgactggtacctacgcgtagctagcccgggcgcgccttaattaagcggccgcatcgatcgtgaagtttctcatctaagcccccatttggacgtgaatgtagacacgtcgaaataaagatttccgaattagaataatttgtttattgctttcgcctataaatacgacggatcgtaatttgtcgttttatcaaaatgtactttcattttataataacgctgcggacatctacatttttgaattgaaaaaaaattggtaattactctttctttttctccatattgaccatcatactcattgctgatccatgtagatttcccggacatgaagccatttacaattgaatatatcctgccgccgctgccgctttgcacccggtggagcttgcatgttggtttctacgcagaactgagccggttaggcagataatttccattgagaactgagccatgtgcaccttccccccaacacggtgagcgacggggcaacggagtgatccacatgggacttttcctagcttggctgccatttttggggtgaggccgttcgcggccgaggggcgcagcccctggggggatgggaggcccgcgttagcgggccgggagggttcgagaagggggggcaccccccttcggcgtgcgcggtcacgcgcacagggcgcagccctggttaaaaacaaggtttataaatattggtttaaaagcaggttaaaagacaggttagcggtggccgaaaaacgggcggaaacccttgcaaatgctggattttctgcctgtggacagcccctcaaatgtcaataggtgcgcccctcatctgtcagcactctgcccctcaagtgtcaaggatcgcgcccctcatctgtcagtagtcgcgcccctcaagtgtcaataccgcagggcacttatccccaggcttgtccacatcatctgtgggaaactcgcgtaaaatcaggcgttttcgccgatttgcgaggctggccagctccacgtcgccggccgaaatcgagcctgcccctcatctgtcaacgccgcgccgggtgagtcggcccctcaagtgtcaacgtccgcccctcatctgtcagtgagggccaagttttccgcgaggtatccacaacgccggcggccggccgcggtgtctcgcacacggcttcgacggcgtttctggcgcgtttgcagggccatagacggccgccagcccagcggcgagggcaaccagcccggtgagcgtcggaaagggtcgatcgaccgatgcccttgagagccttcaacccagtcagctccttccggtgggcgcggggcatgactatcgtcgccgcacttatgactgtcttctttatcatgcaactcgtaggacaggtgccggcagcgctctgggtcattttcggcgaggaccgctttcgctggagcgcgacgatgatcggcctgtcgcttgcggtattcggaatcttgcacgccctcgctcaagccttcgtcactggtcccgccaccaaacgtttcggcgagaagcaggccattatcgccggcatggcggccgacgcgctgggctacgtcttgctggcgttcgcgacgcgaggctggatggccttccccattatgattcttctcgcttccggcggcatcgggatgcccgcgttgcaggccatgctgtccaggcaggtagatgacgaccatcagggacagcttcaaggatcgctcgcggctcttaccagcctaacttcgatcattggaccgctgatcgtcacggcgatttatgccgcctcggcgagcacatggaacgggttggcatggattgtaggcgccgccctataccttgtctgcctccccgcgttgcgtcgcggtgcatggagccgggccacctcgacctgaatggaagccggcggcacctcgctaacggattcaccactccaagaattggagccaatcaattcttgcggagaactgtgaatgcgcaaaccaacccttggcagaacatatccatcgcgtccgccatctccagcagccgcacgcggcgcatctcgggcagcgttgggtcctggccacgggtgcgcatgatcgtgctcctgtcgttgaggacccggctaggctggcggggttgccttactggttagcagaatgaatcaccgatacgcgagcgaacgtgaagcgactgctgctgcaaaacgtctgcgacctgagcaacaacatgaatggtcttcggtttccgtgtttcgtaaagtctggaaacgcggaagtcagcgccctgcaccattatgttccggatctgcatcgcaggatgctgctggctaccctgtggaacacctacatctgtattaacgaagcgctggcattgaccctgagtgatttttctctggtcccgccgcatccataccgccagttgtttaccctcacaacgttccagtaaccgggcatgttcatcatcagtaacccgtatcgtgagcatcctctctcgtttcatcggtatcattacccccatgaacagaaatcccccttacacggaggcatcagtgaccaaacaggaaaaaaccgcccttaacatggcccgctttatcagaagccagacattaacgcttctggagaaactcaacgagctggacgcggatgaacaggcagacatctgtgaatcgcttcacgaccacgctgatgagctttaccgcagctgcctcgcgcgtttcggtgatgacggtgaaaacctctgacacatgcagctcccggagacggtcacagcttgtctgtaagcggatgccgggagcagacaagcccgtcagggcgcgtcagcgggtgttggcgggtgtcggggcgcagccatgacccagtcacgtagcgatagcggagtgtatactggcttaactatgcggcatcagagcagattgtactgagagtgcaccatatgcggtgtgaaataccgcacagatgcgtaaggagaaaataccgcatcaggcgctcttccgcttcctcgctcactgactcgctgcgctcggtcgttcggctgcggcgagcggtatcagctcactcaaaggcggtaatacggttatccacagaatcaggggataacgcaggaaagaacatgtgagcaaaaggccagcaaaaggccaggaaccgtaaaaaggccgcgttgctggcgtttttccataggctccgcccccctgacgagcatcacaaaaatcgacgctcaagtcagaggtggcgaaacccgacaggactataaagataccaggcgtttccccctggaagctccctcgtgcgctctcctgttccgaccctgccgcttaccggatacctgtccgcctttctcccttcgggaagcgtggcgctttctcatagctcacgctgtaggtatctcagttcggtgtaggtcgttcgctccaagctgggctgtgtgcacgaaccccccgttcagcccgaccgctgcgccttatccggtaactatcgtcttgagtccaacccggtaagacacgacttatcgccactggcagcagccactggtaacaggattagcagagcgaggtatgtaggcggtgctacagagttcttgaagtggtggcctaactacggctacactagaaggacagtatttggtatctgcgctctgctgaagccagttaccttcggaaaaagagttggtagctcttgatccggcaaacaaaccaccgctggtagcggtggtttttttgtttgcaagcagcagattacgcgcagaaaaaaaggatctcaagaagatcctttgatcttttctacggggtctgacgctcagtggaacgaaaactcacgttaagggattttggtcatgagattatcaaaaaggatcttcacctagatccttttaaattaaaaatgaagttttaaatcaatctaaagtatatatgagtaaacttggtctgacagttaccaatgcttaatcagtgaggcacctatctcagcgatctgtctatttcgttcatccatagttgcctgactccccgtcgtgtagataactacgatacgggagggcttaccatctggccccagtgctgcaatgataccgcgagacccacgctcaccggctccagatttatcagcaataaaccagccagccggaagggccgagcgcagaagtggtcctgcaactttatccgcctccatccagtctattaattgttgccgggaagctagagtaagtagttcgccagttaatagtttgcgcaacgttgttgccattgctgcaggtcgggagcacaggatgacgcctaacaattcattcaagccgacaccgcttcgcggcgcggcttaattcaggagttaaacatcatgagggaagcggtgatcgccgaagtatcgactcaactatcagaggtagttggcgtcatcgagcgccatctcgaaccgacgttgctggccgtacatttgtacggctccgcagtggatggcggcctgaagccacacagtgatattgatttgctggttacggtgaccgtaaggcttgatgaaacaacgcggcgagctttgatcaacgaccttttggaaacttcggcttcccctggagagagcgagattctccgcgctgtagaagtcaccattgttgtgcacgacgacatcattccgtggcgttatccagctaagcgcgaactgcaatttggagaatggcagcgcaatgacattcttgcaggtatcttcgagccagccacgatcgacattgatctggctatcttgctgacaaaagcaagagaacatagcgttgccttggtaggtccagcggcggaggaactctttgatccggttcctgaacaggatctatttgaggcgctaaatgaaaccttaacgctatggaactcgccgcccgactgggctggcgatgagcgaaatgtagtgcttacgttgtcccgcatttggtacagcgcagtaaccggcaaaatcgcgccgaaggatgtcgctgccgactgggcaatggagcgcctgccggcccagtatcagcccgtcatacttgaagctaggcaggcttatcttggacaagaagatcgcttggcctcgcgcgcagatcagttggaagaatttgttcactacgtgaaaggcgagatcaccaaggtagtcggcaaataatgtctaacaattcgttcaagccgacgccgcttcgcggcgcggcttaactcaagcgttagatgctgcaggcatcgtggtgtcacgctcgtcgtttggtatggcttcattcagctccggttcccaacgatcaaggcgagttacatgatcccccatgttgtgcaaaaaagcggttagctccttcggtcctccgatcgaggatttttcggcgctgcgctacgtccgcgaccgcgttgagggatcaagccacagcagcccactcgaccttctagccgacccagacgagccaagggatctttttggaatgctgctccgtcgtcaggctttccgacgtttgggtggttgaacagaagtcattatcgcacggaatgccaagcactcccgaggggaaccctgtggttggcatgcacatacaaatggacgaacggataaaccttttcacgcccttttaaatatccgattattctaataaacgctcttttctcttaggtttacccgccaatatatcctgtcaaacactgatagtttaaactgaaggcgggaaacgacaatctggcgcgccgctagcctgcaggctgcaggtccgattgagacttttcaacaaagggtaatatccggaaacctcctcggattccattgcccagctatctgtcactttattgtgaagatagtggaaaaggaaggtggctcctacaaatgccatcattgcgataaaggaaaggccatcgttgaagatgcctctgccgacagtggtcccaaagatggacccccacccacgaggagcatcgtggaaaaagaagacgttccaaccacgtcttcaaagcaagtggattgatgtgatggtccgattgagacttttcaacaaagggtaatatccggaaacctcctcggattccattgcccagctatctgtcactttattgtgaagatagtggaaaaggaaggtggctcctacaaatgccatcattgcgataaaggaaaggccatcgttgaagatgcctctgccgacagtggtcccaaagatggacccccacccacgaggagcatcgtggaaaaagaagacgttccaaccacgtcttcaaagcaagtggattgatgtgatatctccactgacgtaagggatgacgcacaatcccactatccttcgcaagacccttcctctatataaggaagttcatttcatttggagaggacacgctgagggcccaccgtcttcggtacgcgctcactccgccctctgcctttgttactgccacgtttctctgaatgctctcttgtgtggtgattgctgagagtggtttagctggatctagaattacactctgaaatcgtgttctgcctgtgctgattacttgccgtcctttgtagcagcaaaatatagggacatggtagtacgaaacgaagatagaacctacacagcaatacgagaaatgtgtaatttggtgcttagcggtatttatttaagcacatgttggtgttatagggcacttggattcagaagtttgctgttaatttaggcacaggcttcatactacatgggtcaatagtatagggattcatattataggcgatactataataatttgttcgtctgcagagcttattatttgccaaaattagatattcctattctgtttttgtttgtgtgctgttaaattgttaacgcctgaaggaataaatataaatgacgaaattttgatgtttatctctgctcctttattgtgaccataagtcaagatcagatgcacttgttttaaatattgttgtctgaagaaataagtactgacagtattttgatgcattgatctgcttgtttgttgtaacaaaatttaaaaataaagagtttcctttttgttgctctccttacctcctgatggtatctagtatctaccaactgacactatattgcttctctttacatacgtatcttgctcgatgccttctccctagtgttgaccagtgttactcacatagtctttgctcatttcattgtaatgcagataccaagcgggagctcgacgtccctcagcagtcgctgtgcgataccatgctagacgcccagaccatcgccaccgttaaggccaccatccccttgctagtggagaccggccctaagctgaccgcccacttctacgaccgcatgttcacccacaaccctgagctgaaggagattttcaacatgagcaaccagcgtaacggcgaccagcgcgaggccctcttcaacgccatcgccgcttacgcctccaacatcgagaacctccccgccctcctgcccgccgtggagaagatcgcccagaagcacacctccttccagatcaagcccgagcagtacaacatcgtgggcgagcacctcctggccaccctcgacgagatgttctcccctggccaggaggtgctcgacgcctggggcaaggcctacggcgtgctcgccaacgtgttcatcaaccgcgaggccgaaatctacaacgagaacgctagcaaggctggcggttgggagggcacccgcgacttcaggattgtggctaagactcccaggtccgctctcattactagcttcgagctggagcccgtggacggcggtgctgtggctgagtaccgtcctggccagtacctcggcgtgtggctcaagcctgagggcttcccgcaccaggagattaggcagtattctctcactaggaagccggacggcaagggctaccggattgctgtgaagcgggaggaaggtgggcaggtctctaactggctgcacaatcacgctaatgtcggtgacgtcgttaagctggtcgctccggctggtgacttctttatggctgtcgcggacgatactccggtcactctgataagtgcgggtgtcggtcagacgccgatgctggcgatgctggacacgcttgcgaaggcggggcacacggcgcaggtcaattggttccacgcggcagagaatggggatgtccatgcgttcgcggatgaggttaaggagcttgggcagtctcttccaagattcacggcacatacctggtacagacagccatcggaagcagatcgagcaaaggggcagttcgattcggaagggcttatggatctttcaaagttagaaggagcattttcagatccaacaatgcaattttatctttgcggaccagttggattcatgcaattcacagcaaaacaacttgttgatttgggagttaaacaagaaaacatacactatgaatgctttggaccacataaggtattgtagatcgccagcggtactcgctgagg

SEQ ID NO: 264 - DNA, 13020 bp, Artificial
  pMON94446
tgaggcctaggcgcggatcccccaccctgcaatgtgaccctagacttgtccatcttctggattggccaacttaattaatgtatgaaataaaaggatgcacacatagtgacatgctaatcactataatgtgggcatcaaagttgtgtgttatgtgtaattactaattatctgaataagagaaagagatcatccatatttcttatcctaaatgaatgtcacgtgtctttataattctttgatgaaccagatgcattttattaaccaattccatatacatataaatattaatcatatataattaatatcaattgggttagcaaaacaaatctagtctaggtgtgttttgctaattattgggggatagtgcaaaaagaaatctacgttctcaataattcagatagaaaacttaataaagtgagataatttacatagattgcttttatcctttgatatatgtgaaaccatgcatgatataaggaaaatagatagagaaataattttttacatcgttgaatatgtaaacaatttaattcaagaagctaggaatataaatattgaggagtttatgattattattattattttgatgttcaatgaagttttttttaatttcatatgaagtatacaaaaattcttcatagatttttgtttctatgccgtagttatctttaatatatttgtggttgaagaaatttattgctagaaacgaatggattgtcaatttttttttaaagcaaatatatatgaaattatactgtatattattttagtcatgattaaaatgtggccttaattgaatcatctttctcattcattttttcaaaagcatatcaggatgattgatatttatctattttaaaaattaatttaagggttcaaattaaatttaacttaaaagtgtcctaaccgtagttaaaggtttactttaaaaaaatactatgaaaaatctaatcttctatgaatcgaccggatttaaatccatcgttctggggcctaacgggccaagctttccgatcctacctgtcacttcatcaaaaggacagtagaaaaggaaggtggcacctacaaatgccatcattgcgataaaggaaaggctatcattcaagatgcctctgccgacagtggtcccaaagatggacccccacccacgaggagcatcgtggaaaaagaagacgttccaaccacgtcttcaaagcaagtggattgatgtgatacttccactgacgtaagggatgacgcacaatcccactatccttcgcaagacccttcctctatataaggaagttcatttcatttggagaggacacgctgaaatcaccagtctctctctacaagatcggggatctctagctagacgatcgtttcgcatgattgaacaagatggattgcacgcaggttctccggccgcttgggtggagaggctattcggctatgacattcggctatgactgggcacaacagacaatcggctgctctgatgccgccgtgttccggctgtcagcgcaggggcgcccggttctttttgtcaagaccgacctgtccggtgccctgaatgaactgcaggacgaggcagcgcggctatcgtggctggccacgacgggcgttccttgcgcagctgtgctcgacgttgtcactgaagcgggaagggactggctgctattgggcgaagtgccggggcaggatctcctgtcatctcaccttgctcctgccgagaaagtatccatcatggctgatgcaatgcggcggctgcatacgcttgatccggctacctgcccattcgaccaccaagcgaaacatcgcatcgagcgagcacgtactcggatggaagccggtcttgtcgatcaggatgatctggacgaagagcatcaggggctcgcgccagccgaactgttcgccaggctcaaggcgcgcatgcccgacggcgaggatctcgtcgtgacccatggcgatgcctgcttgccgaatatcatggtggaaaatggccgcttttctggattcatcgactgtggccggctgggtgtggcggaccgctatcaggacatagcgttggctacccgtgatattgctgaagagcttggcggcgaatgggctgaccgcttcctcgtgctttacggtatcgccgctcccgattcgcagcgcatcgccttctatcgccttcttgacgagttcttctgagcgggactctggggttcgaagaattcccgatcgttcaaacatttggcaataaagtttcttaagattgaatcctgttgccggtcttgcgatgattatcatataatttctgttgaattacgttaagcatgtaataattaacatgtaatgcatgacgttatttatgagatgggtttttatgattagagtcccgcaattatacatttaatacgcgatagaaaacaaaatatagcgcgcaaactaggataaattatcgcgcgcggtgtcatctatgttactagatcggggatatcgcgtgtctttataattctttgatgaaccagatgcattttattaaccaattccatatacatataaatattaatcatatataattaatatcaattgggttagcaaaacaaatctagtctaggtgtgttttgctaattattgggggatagtgcaaaaagaaatctacgttctcaataattcagatagaaaacttaataaagtgagataatttacatagattgcttttatcctttgatatatgtgaaaccatgcatgatataaggaaaatagatagagaaataattttttacatcgttgaatatgtaaacaatttaattcaagaagctaggaatataaatattgaggagtttatgattattattattattttgatgttcaatgaagttttttttaatttcatatgaagtatacaaaaattcttcatagatttttgtttctatgccgtagttatctttaatatatttgtggttgaagaaatttattgctagaaacgaatggattgtcaatttttttttaaagcaaatatatatgaaattatactgtatattattttagtcatgattaaaatgtggccttaattgaatcatctttctcattcattttttcaaaagcatatcaggatgattgatatttatctattttaaaaattaatttaagggttcaaattaaatttaacttaaaagtgtcctaaccgtagttaaaggtttactttaaaaaaatactatgaaaaatctaatcttctatgaatcgaccgctgatcgatcgcggccgctggcgcgccttaattaagcggccgcatcgatcgtgaagtttctcatctaagcccccatttggacgtgaatgtagacacgtcgaaataaagatttccgaattagaataatttgtttattgctttcgcctataaatacgacggatcgtaatttgtcgttttatcaaaatgtactttcattttataataacgctgcggacatctacatttttgaattgaaaaaaaattggtaattactctttctttttctccatattgaccatcatactcattgctgatccatgtagatttcccggacatgaagccatttacaattgaatatatcctgccgccgctgccgctttgcacccggtggagcttgcatgttggtttctacgcagaactgagccggttaggcagataatttccattgagaactgagccatgtgcaccttccccccaacacggtgagcgacggggcaacggagtgatccacatgggacttttcctagcttggctgccatttttggggtgaggccgttcgcggccgaggggcgcagcccctggggggatgggaggcccgcgttagcgggccgggagggttcgagaagggggggcaccccccttcggcgtgcgcggtcacgcgcacagggcgcagccctggttaaaaacaaggtttataaatattggtttaaaagcaggttaaaagacaggttagcggtggccgaaaaacgggcggaaacccttgcaaatgctggattttctgcctgtggacagcccctcaaatgtcaataggtgcgcccctcatctgtcagcactctgcccctcaagtgtcaaggatcgcgcccctcatctgtcagtagtcgcgcccctcaagtgtcaataccgcagggcacttatccccaggcttgtccacatcatctgtgggaaactcgcgtaaaatcaggcgttttcgccgatttgcgaggctggccagctccacgtcgccggccgaaatcgagcctgcccctcatctgtcaacgccgcgccgggtgagtcggcccctcaagtgtcaacgtccgcccctcatctgtcagtgagggccaagttttccgcgaggtatccacaacgccggcggccggccgcggtgtctcgcacacggcttcgacggcgtttctggcgcgtttgcagggccatagacggccgccagcccagcggcgagggcaaccagcccggtgagcgtcggaaagggtcgatcgaccgatgcccttgagagccttcaacccagtcagctccttccggtgggcgcggggcatgactatcgtcgccgcacttatgactgtcttctttatcatgcaactcgtaggacaggtgccggcagcgctctgggtcattttcggcgaggaccgctttcgctggagcgcgacgatgatcggcctgtcgcttgcggtattcggaatcttgcacgccctcgctcaagccttcgtcactggtcccgccaccaaacgtttcggcgagaagcaggccattatcgccggcatggcggccgacgcgctgggctacgtcttgctggcgttcgcgacgcgaggctggatggccttccccattatgattcttctcgcttccggcggcatcgggatgcccgcgttgcaggccatgctgtccaggcaggtagatgacgaccatcagggacagcttcaaggatcgctcgcggctcttaccagcctaacttcgatcattggaccgctgatcgtcacggcgatttatgccgcctcggcgagcacatggaacgggttggcatggattgtaggcgccgccctataccttgtctgcctccccgcgttgcgtcgcggtgcatggagccgggccacctcgacctgaatggaagccggcggcacctcgctaacggattcaccactccaagaattggagccaatcaattcttgcggagaactgtgaatgcgcaaaccaacccttggcagaacatatccatcgcgtccgccatctccagcagccgcacgcggcgcatctcgggcagcgttgggtcctggccacgggtgcgcatgatcgtgctcctgtcgttgaggacccggctaggctggcggggttgccttactggttagcagaatgaatcaccgatacgcgagcgaacgtgaagcgactgctgctgcaaaacgtctgcgacctgagcaacaacatgaatggtcttcggtttccgtgtttcgtaaagtctggaaacgcggaagtcagcgccctgcaccattatgttccggatctgcatcgcaggatgctgctggctaccctgtggaacacctacatctgtattaacgaagcgctggcattgaccctgagtgatttttctctggtcccgccgcatccataccgccagttgtttaccctcacaacgttccagtaaccgggcatgttcatcatcagtaacccgtatcgtgagcatcctctctcgtttcatcggtatcattacccccatgaacagaaatcccccttacacggaggcatcagtgaccaaacaggaaaaaaccgcccttaacatggcccgctttatcagaagccagacattaacgcttctggagaaactcaacgagctggacgcggatgaacaggcagacatctgtgaatcgcttcacgaccacgctgatgagctttaccgcagctgcctcgcgcgtttcggtgatgacggtgaaaacctctgacacatgcagctcccggagacggtcacagcttgtctgtaagcggatgccgggagcagacaagcccgtcagggcgcgtcagcgggtgttggcgggtgtcggggcgcagccatgacccagtcacgtagcgatagcggagtgtatactggcttaactatgcggcatcagagcagattgtactgagagtgcaccatatgcggtgtgaaataccgcacagatgcgtaaggagaaaataccgcatcaggcgctcttccgcttcctcgctcactgactcgctgcgctcggtcgttcggctgcggcgagcggtatcagctcactcaaaggcggtaatacggttatccacagaatcaggggataacgcaggaaagaacatgtgagcaaaaggccagcaaaaggccaggaaccgtaaaaaggccgcgttgctggcgtttttccataggctccgcccccctgacgagcatcacaaaaatcgacgctcaagtcagaggtggcgaaacccgacaggactataaagataccaggcgtttccccctggaagctccctcgtgcgctctcctgttccgaccctgccgcttaccggatacctgtccgcctttctcccttcgggaagcgtggcgctttctcatagctcacgctgtaggtatctcagttcggtgtaggtcgttcgctccaagctgggctgtgtgcacgaaccccccgttcagcccgaccgctgcgccttatccggtaactatcgtcttgagtccaacccggtaagacacgacttatcgccactggcagcagccactggtaacaggattagcagagcgaggtatgtaggcggtgctacagagttcttgaagtggtggcctaactacggctacactagaaggacagtatttggtatctgcgctctgctgaagccagttaccttcggaaaaagagttggtagctcttgatccggcaaacaaaccaccgctggtagcggtggtttttttgtttgcaagcagcagattacgcgcagaaaaaaaggatctcaagaagatcctttgatcttttctacggggtctgacgctcagtggaacgaaaactcacgttaagggattttggtcatgagattatcaaaaaggatcttcacctagatccttttaaattaaaaatgaagttttaaatcaatctaaagtatatatgagtaaacttggtctgacagttaccaatgcttaatcagtgaggcacctatctcagcgatctgtctatttcgttcatccatagttgcctgactccccgtcgtgtagataactacgatacgggagggcttaccatctggccccagtgctgcaatgataccgcgagacccacgctcaccggctccagatttatcagcaataaaccagccagccggaagggccgagcgcagaagtggtcctgcaactttatccgcctccatccagtctattaattgttgccgggaagctagagtaagtagttcgccagttaatagtttgcgcaacgttgttgccattgctgcaggtcgggagcacaggatgacgcctaacaattcattcaagccgacaccgcttcgcggcgcggcttaattcaggagttaaacatcatgagggaagcggtgatcgccgaagtatcgactcaactatcagaggtagttggcgtcatcgagcgccatctcgaaccgacgttgctggccgtacatttgtacggctccgcagtggatggcggcctgaagccacacagtgatattgatttgctggttacggtgaccgtaaggcttgatgaaacaacgcggcgagctttgatcaacgaccttttggaaacttcggcttcccctggagagagcgagattctccgcgctgtagaagtcaccattgttgtgcacgacgacatcattccgtggcgttatccagctaagcgcgaactgcaatttggagaatggcagcgcaatgacattcttgcaggtatcttcgagccagccacgatcgacattgatctggctatcttgctgacaaaagcaagagaacatagcgttgccttggtaggtccagcggcggaggaactctttgatccggttcctgaacaggatctatttgaggcgctaaatgaaaccttaacgctatggaactcgccgcccgactgggctggcgatgagcgaaatgtagtgcttacgttgtcccgcatttggtacagcgcagtaaccggcaaaatcgcgccgaaggatgtcgctgccgactgggcaatggagcgcctgccggcccagtatcagcccgtcatacttgaagctaggcaggcttatcttggacaagaagatcgcttggcctcgcgcgcagatcagttggaagaatttgttcactacgtgaaaggcgagatcaccaaggtagtcggcaaataatgtctaacaattcgttcaagccgacgccgcttcgcggcgcggcttaactcaagcgttagatgctgcaggcatcgtggtgtcacgctcgtcgtttggtatggcttcattcagctccggttcccaacgatcaaggcgagttacatgatcccccatgttgtgcaaaaaagcggttagctccttcggtcctccgatcgaggatttttcggcgctgcgctacgtccgcgaccgcgttgagggatcaagccacagcagcccactcgaccttctagccgacccagacgagccaagggatctttttggaatgctgctccgtcgtcaggctttccgacgtttgggtggttgaacagaagtcattatcgcacggaatgccaagcactcccgaggggaaccctgtggttggcatgcacatacaaatggacgaacggataaaccttttcacgcccttttaaatatccgattattctaataaacgctcttttctcttaggtttacccgccaatatatcctgtcaaacactgatagtttaaactgaaggcgggaaacgacaatctggcgcgccgctagcctgcaggcatgtgctggtgccccataaggtaggcacctaggtctgtgtttgaagcatcgacagatttgtaaacatgttcctatgaacctatttctgattgataatttgtcaaaactcatcatttgtcttcatccttgcctgcttgcgttcacgtgacaaagtacgtgtatgtcttcggcctttgctgtgtatgtttcgcattgcttagatgtggtgaaagaacatcagaagatgcattgatggcgtgcttaaaccagtgatgtgctccaggtgttcctgcagtctgcagagatatttactcttgtagtcttgttgacagcacagttgtatgtgatttcttggatgtaatgtaaaccaaatgaaagataggaacagttcgtcctcttccgtatacgaaggtcactgtatcatttgtcgtggcacaagatgatctgcaggcaggactgcaacatggtttcttggactgtcctgaatgcccgttcttgttctttagttgagccagagcagcagcctggtgtcggtgcctgagacctgacgaagcacacggcaaacaaacaagtcgcagcagctagcaggggcgttgccatcgccacaagcccccaagagacccgccgaggaaaagaaaaaaaaactacggccgccgttgccaagccgagcgtgcgaaccgatccacggatgggagatcagagatcacccaccgcaggcgggcggcagtggctggcgaggtgcgtccacagaacctgctgcaggtccctgtccgtcccggcgaccccttttctaggcgagcaactccccatggcagagctgcacgcagcagggcccgtcgttggttgcagctttaaccctttttgttttaaccatacaatgcagagtcgcagaggtgaaacaggacggaaattacagaaaagatggtggtgtgccagcagccccagcatgaagaagatcaggacaaaagaaaagcttgtgattggtgacagcaacaggattggattggagccaagctaggcagtgagaggcaggcagcaagacgcgtcagccactgaaatccagagggcaacctcggcctcacaactcatatccccttgtgctgttgcgcgccgtggttagccaggtgtgctgcagggggtaccatggcatgcatcgatagatctcgagggatccaaagacatggaggtggaaggcctgacgtagatagagaagatgctcttagctttcattgtctttcttttgtagtcatctgatttacctctctcgtttatacaactggttttttaaacactccttaacttttcaaattgtctctttctttaccctagactagataattttaatggtgattttgctaatgtggcgccatgttagatagaggtaaaatgaactagttaaaagctcagagtgataaatcaggctctcaaaaattcataaactgttttttaaatatccaaatatttttacatggaaaataataaaatttagtttagtattaaaaaattcagttgaatatagttttgtcttcaaaaattatgaaactgatcttaattatttttccttaaaaccgtgctctatctttgatgtctagtttgagacgattatataattttttttgtgcttaactacgacgagctgaagtacgtagaaatactagtggagtcgtgccgcgtgtgcctgtagccactcgtacgctacagcccaagcgctagagcccaagaggccggaggtggaaggcgtcgcggcactatagccactcgccgcaagagcccaagagaccggagctggaaggatgagggtctgggtgttcacgaattgcctggaggcaggaggctcgtcgtccggagccacaggcgtggagacgtccgggataaggtgagcagccgctgcgataggggcgcgtgtgaaccccgtcgcgccccacggatggtataagaataaaggcattccgcgtgcaggattcacccgttcgcctctcaccttttcgctgtactcactcgccacacacaccccctctccagctccgttggagctccggacagcagcaggcgcggggcggtcacgtagtaagcagctctcggctccctctccccttgctccatttgatagtgcaacccatcgagctacaccggtgcggcccaccgtcttcggtacgcgctcactccgccctctgcctttgttactgccacgtttctctgaatgctctcttgtgtggtgattgctgagagtggtttagctggatctagaattacactctgaaatcgtgttctgcctgtgctgattacttgccgtcctttgtagcagcaaaatatagggacatggtagtacgaaacgaagatagaacctacacagcaatacgagaaatgtgtaatttggtgcttagcggtatttatttaagcacatgttggtgttatagggcacttggattcagaagtttgctgttaatttaggcacaggcttcatactacatgggtcaatagtatagggattcatattataggcgatactataataatttgttcgtctgcagagcttattatttgccaaaattagatattcctattctgtttttgtttgtgtgctgttaaattgttaacgcctgaaggaataaatataaatgacgaaattttgatgtttatctctgctcctttattgtgaccataagtcaagatcagatgcacttgttttaaatattgttgtctgaagaaataagtactgacagtattttgatgcattgatctgcttgtttgttgtaacaaaatttaaaaataaagagtttcctttttgttgctctccttacctcctgatggtatctagtatctaccaactgacactatattgcttctctttacatacgtatcttgctcgatgccttctccctagtgttgaccagtgttactcacatagtctttgctcatttcattgtaatgcagataccaagcgggagctcgacgtccctcagcagtcgctgtgcgataccatgcttgacgctcaaaccatcgctacagtaaaagccaccatccctttactggtggaaacggggccaaagttaaccgcccatttctacgaccgtatgtttactcataacccagaactcaaagaaatttttaacatgagtaaccagcgtaatggcgatcaacgtgaagccctgtttaacgctattgccgcctacgccagtaatattgaaaacctgcctgcgctgctgccagcggtagaaaaaatcgcgcagaagcacaccagcttccagatcaaaccggaacagtacaacatcgtcggtgaacacctgttggcaacgctggacgaaatgttcagcccggggcaggaagtgctggacgcgtggggtaaagcctatggtgtactggctaatgtatttatcaatcgcgaggcggaaatctataacgaaaacgccagcaaagccggtggttgggaaggtactcgcgatttccgcattgtggctaaaacaccgcgcagcgcgcttatcaccagcttcgaactggagccggtcgacggtggcgcagtggcagaataccgtccggggcaatatctcggcgtctggctgaagccggaaggtttcccacatcaggaaattcgtcagtactctttgactcgcaaaccggatggcaaaggctatcgtattgcggtgaaacgcgaagagggtgggcaggtatccaactggttgcacaatcacgccaatgttggcgatgtcgtgaaactggtcgctccggcaggtgatttctttatggctgtcgcagatgacacaccagtgacgttaatctctgccggtgttggtcaaacgccaatgctggcaatgctcgacacgctggcaaaagcaggccacacagcacaagtgaactggttccatgcggcagaaaatggcgatgttcacgcctttgccgatgaagttaaggaactggggcagtcactgccgcgctttaccgcgcacacctggtatcgtcagccgagcgaagccgatcgcgctaaaggtcagtttgatagcgaaggtctgatggatttgagcaaactggaaggtgcgttcagcgatccgacaatgcagttctatctctgcggcccggttggcttcatgcagtttaccgcgaaacagttagtggatctgggcgtgaagcaggaaaacattcattacgaatgctttggcccgcataaggtgctgtagatcgccagcggtactcgc

SEQ ID NO: 265 - DNA, 12876 bp, Artificial
  pMON102760
cagcggtactcgctgaggcctaggcgcggatcccccaccctgcaatgtgaccctagacttgtccatcttctggattggccaacttaattaatgtatgaaataaaaggatgcacacatagtgacatgctaatcactataatgtgggcatcaaagttgtgtgttatgtgtaattactaattatctgaataagagaaagagatcatccatatttcttatcctaaatgaatgtcacgtgtctttataattctttgatgaaccagatgcattttattaaccaattccatatacatataaatattaatcatatataattaatatcaattgggttagcaaaacaaatctagtctaggtgtgttttgctaattattgggggatagtgcaaaaagaaatctacgttctcaataattcagatagaaaacttaataaagtgagataatttacatagattgcttttatcctttgatatatgtgaaaccatgcatgatataaggaaaatagatagagaaataattttttacatcgttgaatatgtaaacaatttaattcaagaagctaggaatataaatattgaggagtttatgattattattattattttgatgttcaatgaagttttttttaatttcatatgaagtatacaaaaattcttcatagatttttgtttctatgccgtagttatctttaatatatttgtggttgaagaaatttattgctagaaacgaatggattgtcaatttttttttaaagcaaatatatatgaaattatactgtatattattttagtcatgattaaaatgtggccttaattgaatcatctttctcattcattttttcaaaagcatatcaggatgattgatatttatctattttaaaaattaatttaagggttcaaattaaatttaacttaaaagtgtcctaaccgtagttaaaggtttactttaaaaaaatactatgaaaaatctaatcttctatgaatcgaccggatttaaatccatcgttctggggcctaacgggccaagcttactcgaggtcattcatatgcttgagaagagagtcgggatagtccaaaataaaacaaaggtaagattacctggtcaaaagtgaaaacatcagttaaaaggtggtataaagtaaaatatcggtaataaaaggtggcccaaagtgaaatttactcttttctactattataaaaattgaggatgtttttgtcggtactttgatacgtcatttttgtatgaattggtttttaagtttattcgcttttggaaatgcatatctgtatttgagtcgggttttaagttcgtttgcttttgtaaatacagagggatttgtataagaaatatctttagaaaaacccatatgctaatttgacataatttttgagaaaaatatatattcaggcgaattctcacaatgaacaataataagattaaaatagctttcccccgttgcagcgcatgggtattttttctagtaaaaataaaagataaacttagactcaaaacatttacaaaaacaacccctaaagttcctaaagcccaaagtgctatccacgatccatagcaagcccagcccaacccaacccaacccaacccaccccagtccagccaactggacaatagtctccacacccccccactatcaccgtgagttgtccgcacgcaccgcacgtctcgcagccaaaaaaaaaaagaaagaaaaaaaagaaaaagaaaaaacagcaggtgggtccgggtcgtgggggccggaaacgcgaggaggatcgcgagccagcgacgaggccggccctccctccgcttccaaagaaacgccccccatcgccactatatacatacccccccctctcctcccatccccccaaccctaccaccaccaccaccaccacctccacctcctcccccctcgctgccggacgacgagctcctcccccctccccctccgccgccgccgcgccggtaaccaccccgcccctctcctctttctttctccgtttttttttccgtctcggtctcgatctttggccttggtagtttgggtgggcgagaggcggcttcgtgcgcgcccagatcggtgcgcgggaggggcgggatctcgcggctggggctctcgccggcgtggatccggcccggatctcgcggggaatggggctctcggatgtagatctgcgatccgccgttgttgggggagatgatggggggtttaaaatttccgccgtgctaaacaagatcaggaagaggggaaaagggcactatggtttatatttttatatatttctgctgcttcgtcaggcttagatgtgctagatctttctttcttctttttgtgggtagaatttgaatccctcagcattgttcatcggtagtttttcttttcatgatttgtgacaaatgcagcctcgtgcggagcttttttgtaggtagaagtgatcaaccatggcgcaagttagcagaatctgcaatggtgtgcagaacccatctcttatctccaatctctcgaaatccagtcaacgcaaatctcccttatcggtttctctgaagacgcagcagcatccacgagcttatccgatttcgtcgtcgtggggattgaagaagagtgggatgacgttaattggctctgagcttcgtcctcttaaggtcatgtcttctgtttccacggcgtgcatgcttcacggtgcaagcagccggcccgcaaccgcccgcaaatcctctggcctttccggaaccgtccgcattcccggcgacaagtcgatctcccaccggtccttcatgttcggcggtctcgcgagcggtgaaacgcgcatcaccggccttctggaaggcgaggacgtcatcaatacgggcaaggccatgcaggcgatgggcgcccgcatccgtaaggaaggcgacacctggatcatcgatggcgtcggcaatggcggcctcctggcgcctgaggcgccgctcgatttcggcaatgccgccacgggctgccgcctgacgatgggcctcgtcggggtctacgatttcgacagcaccttcatcggcgacgcctcgctcacaaagcgcccgatgggccgcgtgttgaacccgctgcgcgaaatgggcgtgcaggtgaaatcggaagacggtgaccgtcttcccgttaccttgcgcgggccgaagacgccgacgccgatcacctaccgcgtgccgatggcctccgcacaggtgaagtccgccgtgctgctcgccggcctcaacacgcccggcatcacgacggtcatcgagccgatcatgacgcgcgatcatacggaaaagatgctgcagggctttggcgccaaccttaccgtcgagacggatgcggacggcgtgcgcaccatccgcctggaaggccgcggcaagctcaccggccaagtcatcgacgtgccgggcgacccgtcctcgacggccttcccgctggttgcggccctgcttgttccgggctccgacgtcaccatcctcaacgtgctgatgaaccccacccgcaccggcctcatcctgacgctgcaggaaatgggcgccgacatcgaagtcatcaacccgcgccttgccggcggcgaagacgtggcggacctgcgcgttcgctcctccacgctgaagggcgtcacggtgccggaagaccgcgcgccttcgatgatcgacgaatatccgattctcgctgtcgccgccgccttcgcggaaggggcgaccgtgatgaacggtctggaagaactccgcgtcaaggaaagcgaccgcctctcggccgtcgccaatggcctcaagctcaatggcgtggattgcgatgagggcgagacgtcgctcgtcgtgcgtggccgccctgacggcaaggggctcggcaacgcctcgggcgccgccgtcgccacccatctcgatcaccgcatcgccatgagcttcctcgtcatgggcctcgtgtcggaaaaccctgtcacggtggacgatgccacgatgatcgccacgagcttcccggagttcatggacctgatggccgggctgggcgcgaagatcgaactctccgatacgaaggctgcctgatgagctcgaattcccgatcgttcaaacatttggcaataaagtttcttaagattgaatcctgttgccggtcttgcgatgattatcatataatttctgttgaattacgttaagcatgtaataattaacatgtaatgcatgacgttatttatgagatgggtttttatgattagagtcccgcaattatacatttaatacgcgatagaaaacaaaatatagcgcgcaaactaggataaattatcgcgcgcggtgtcatctatgttactagatcggggatgggggatccactagtgatatccgtcgactggtacctacgcgtagctagcccgggcgcgccttaattaagcggccgcatcgatcgtgaagtttctcatctaagcccccatttggacgtgaatgtagacacgtcgaaataaagatttccgaattagaataatttgtttattgctttcgcctataaatacgacggatcgtaatttgtcgttttatcaaaatgtactttcattttataataacgctgcggacatctacatttttgaattgaaaaaaaattggtaattactctttctttttctccatattgaccatcatactcattgctgatccatgtagatttcccggacatgaagccatttacaattgaatatatcctgccgccgctgccgctttgcacccggtggagcttgcatgttggtttctacgcagaactgagccggttaggcagataatttccattgagaactgagccatgtgcaccttccccccaacacggtgagcgacggggcaacggagtgatccacatgggacttttcctagcttggctgccatttttggggtgaggccgttcgcggccgaggggcgcagcccctggggggatgggaggcccgcgttagcgggccgggagggttcgagaagggggggcaccccccttcggcgtgcgcggtcacgcgcacagggcgcagccctggttaaaaacaaggtttataaatattggtttaaaagcaggttaaaagacaggttagcggtggccgaaaaacgggcggaaacccttgcaaatgctggattttctgcctgtggacagcccctcaaatgtcaataggtgcgcccctcatctgtcagcactctgcccctcaagtgtcaaggatcgcgcccctcatctgtcagtagtcgcgcccctcaagtgtcaataccgcagggcacttatccccaggcttgtccacatcatctgtgggaaactcgcgtaaaatcaggcgttttcgccgatttgcgaggctggccagctccacgtcgccggccgaaatcgagcctgcccctcatctgtcaacgccgcgccgggtgagtcggcccctcaagtgtcaacgtccgcccctcatctgtcagtgagggccaagttttccgcgaggtatccacaacgccggcggccggccgcggtgtctcgcacacggcttcgacggcgtttctggcgcgtttgcagggccatagacggccgccagcccagcggcgagggcaaccagcccggtgagcgtcggaaagggtcgatcgaccgatgcccttgagagccttcaacccagtcagctccttccggtgggcgcggggcatgactatcgtcgccgcacttatgactgtcttctttatcatgcaactcgtaggacaggtgccggcagcgctctgggtcattttcggcgaggaccgctttcgctggagcgcgacgatgatcggcctgtcgcttgcggtattcggaatcttgcacgccctcgctcaagccttcgtcactggtcccgccaccaaacgtttcggcgagaagcaggccattatcgccggcatggcggccgacgcgctgggctacgtcttgctggcgttcgcgacgcgaggctggatggccttccccattatgattcttctcgcttccggcggcatcgggatgcccgcgttgcaggccatgctgtccaggcaggtagatgacgaccatcagggacagcttcaaggatcgctcgcggctcttaccagcctaacttcgatcattggaccgctgatcgtcacggcgatttatgccgcctcggcgagcacatggaacgggttggcatggattgtaggcgccgccctataccttgtctgcctccccgcgttgcgtcgcggtgcatggagccgggccacctcgacctgaatggaagccggcggcacctcgctaacggattcaccactccaagaattggagccaatcaattcttgcggagaactgtgaatgcgcaaaccaacccttggcagaacatatccatcgcgtccgccatctccagcagccgcacgcggcgcatctcgggcagcgttgggtcctggccacgggtgcgcatgatcgtgctcctgtcgttgaggacccggctaggctggcggggttgccttactggttagcagaatgaatcaccgatacgcgagcgaacgtgaagcgactgctgctgcaaaacgtctgcgacctgagcaacaacatgaatggtcttcggtttccgtgtttcgtaaagtctggaaacgcggaagtcagcgccctgcaccattatgttccggatctgcatcgcaggatgctgctggctaccctgtggaacacctacatctgtattaacgaagcgctggcattgaccctgagtgatttttctctggtcccgccgcatccataccgccagttgtttaccctcacaacgttccagtaaccgggcatgttcatcatcagtaacccgtatcgtgagcatcctctctcgtttcatcggtatcattacccccatgaacagaaatcccccttacacggaggcatcagtgaccaaacaggaaaaaaccgcccttaacatggcccgctttatcagaagccagacattaacgcttctggagaaactcaacgagctggacgcggatgaacaggcagacatctgtgaatcgcttcacgaccacgctgatgagctttaccgcagctgcctcgcgcgtttcggtgatgacggtgaaaacctctgacacatgcagctcccggagacggtcacagcttgtctgtaagcggatgccgggagcagacaagcccgtcagggcgcgtcagcgggtgttggcgggtgtcggggcgcagccatgacccagtcacgtagcgatagcggagtgtatactggcttaactatgcggcatcagagcagattgtactgagagtgcaccatatgcggtgtgaaataccgcacagatgcgtaaggagaaaataccgcatcaggcgctcttccgcttcctcgctcactgactcgctgcgctcggtcgttcggctgcggcgagcggtatcagctcactcaaaggcggtaatacggttatccacagaatcaggggataacgcaggaaagaacatgtgagcaaaaggccagcaaaaggccaggaaccgtaaaaaggccgcgttgctggcgtttttccataggctccgcccccctgacgagcatcacaaaaatcgacgctcaagtcagaggtggcgaaacccgacaggactataaagataccaggcgtttccccctggaagctccctcgtgcgctctcctgttccgaccctgccgcttaccggatacctgtccgcctttctcccttcgggaagcgtggcgctttctcatagctcacgctgtaggtatctcagttcggtgtaggtcgttcgctccaagctgggctgtgtgcacgaaccccccgttcagcccgaccgctgcgccttatccggtaactatcgtcttgagtccaacccggtaagacacgacttatcgccactggcagcagccactggtaacaggattagcagagcgaggtatgtaggcggtgctacagagttcttgaagtggtggcctaactacggctacactagaaggacagtatttggtatctgcgctctgctgaagccagttaccttcggaaaaagagttggtagctcttgatccggcaaacaaaccaccgctggtagcggtggtttttttgtttgcaagcagcagattacgcgcagaaaaaaaggatctcaagaagatcctttgatcttttctacggggtctgacgctcagtggaacgaaaactcacgttaagggattttggtcatgagattatcaaaaaggatcttcacctagatccttttaaattaaaaatgaagttttaaatcaatctaaagtatatatgagtaaacttggtctgacagttaccaatgcttaatcagtgaggcacctatctcagcgatctgtctatttcgttcatccatagttgcctgactccccgtcgtgtagataactacgatacgggagggcttaccatctggccccagtgctgcaatgataccgcgagacccacgctcaccggctccagatttatcagcaataaaccagccagccggaagggccgagcgcagaagtggtcctgcaactttatccgcctccatccagtctattaattgttgccgggaagctagagtaagtagttcgccagttaatagtttgcgcaacgttgttgccattgctgcaggtcgggagcacaggatgacgcctaacaattcattcaagccgacaccgcttcgcggcgcggcttaattcaggagttaaacatcatgagggaagcggtgatcgccgaagtatcgactcaactatcagaggtagttggcgtcatcgagcgccatctcgaaccgacgttgctggccgtacatttgtacggctccgcagtggatggcggcctgaagccacacagtgatattgatttgctggttacggtgaccgtaaggcttgatgaaacaacgcggcgagctttgatcaacgaccttttggaaacttcggcttcccctggagagagcgagattctccgcgctgtagaagtcaccattgttgtgcacgacgacatcattccgtggcgttatccagctaagcgcgaactgcaatttggagaatggcagcgcaatgacattcttgcaggtatcttcgagccagccacgatcgacattgatctggctatcttgctgacaaaagcaagagaacatagcgttgccttggtaggtccagcggcggaggaactctttgatccggttcctgaacaggatctatttgaggcgctaaatgaaaccttaacgctatggaactcgccgcccgactgggctggcgatgagcgaaatgtagtgcttacgttgtcccgcatttggtacagcgcagtaaccggcaaaatcgcgccgaaggatgtcgctgccgactgggcaatggagcgcctgccggcccagtatcagcccgtcatacttgaagctaggcaggcttatcttggacaagaagatcgcttggcctcgcgcgcagatcagttggaagaatttgttcactacgtgaaaggcgagatcaccaaggtagtcggcaaataatgtctaacaattcgttcaagccgacgccgcttcgcggcgcggcttaactcaagcgttagatgctgcaggcatcgtggtgtcacgctcgtcgtttggtatggcttcattcagctccggttcccaacgatcaaggcgagttacatgatcccccatgttgtgcaaaaaagcggttagctccttcggtcctccgatcgaggatttttcggcgctgcgctacgtccgcgaccgcgttgagggatcaagccacagcagcccactcgaccttctagccgacccagacgagccaagggatctttttggaatgctgctccgtcgtcaggctttccgacgtttgggtggttgaacagaagtcattatcgcacggaatgccaagcactcccgaggggaaccctgtggttggcatgcacatacaaatggacgaacggataaaccttttcacgcccttttaaatatccgattattctaataaacgctcttttctcttaggtttacccgccaatatatcctgtcaaacactgatagtttaaactgaaggcgggaaacgacaatctggcgcgccgctagcctgcaggggaggattttcaggcttcgcattgcccaacctctgcttctgttggcccaagaagaatcccaggcgcccatgggctggcagtttaccacggacctacctagcctaccttagctatctaagcgggccgacctagtagccacgtgcctagtgtagattaaagttgccgggccagcaggaagccacgctgcaatggcatcttcccctgtccttcgcgtacgtgaaaacaaacccaggtaagcttagaatcttcttgcccgttggactgggacacccaccaatcccaccatgccccgatattcccccggtctcggttcatgtgatgtcctctcttgtgtgatcacggagcaagcattcttaaacggcaaaagaaaatcaccaacttgctcacgcagtcacgctgcaccgcgcgaagcgacgcccgataggccaagatcgcgagataaaataacaaccaatgatcataaggaaacaagcccgcgatgtgtcgtgtgcagcaatcttggtcatttgcgggatcgagtgcttcacagctaaccaaatattcggccgatgatttaacacattatcagcgtagatgtacgtacgatttgttaattaatctacgagccttgctagggcaggtgttctgccagccaatccagatcgccctcgtatgcacgctcacaggatggcagggcagggttcacatgagctctaacggtcgattaattaatcccggggctcgactataaatacctccctaatcccatgatcaaaaccatctcaagcagcctaatcatctccagctgatcaagagctcttaattagctagctagtgattagctgcgcttgtgatcgatcgatctcgggtacgtagcagggcccaccgtcttcggtacgcgctcactccgccctctgcctttgttactgccacgtttctctgaatgctctcttgtgtggtgattgctgagagtggtttagctggatctagaattacactctgaaatcgtgttctgcctgtgctgattacttgccgtcctttgtagcagcaaaatatagggacatggtagtacgaaacgaagatagaacctacacagcaatacgagaaatgtgtaatttggtgcttagcggtatttatttaagcacatgttggtgttatagggcacttggattcagaagtttgctgttaatttaggcacaggcttcatactacatgggtcaatagtatagggattcatattataggcgatactataataatttgttcgtctgcagagcttattatttgccaaaattagatattcctattctgtttttgtttgtgtgctgttaaattgttaacgcctgaaggaataaatataaatgacgaaattttgatgtttatctctgctcctttattgtgaccataagtcaagatcagatgcacttgttttaaatattgttgtctgaagaaataagtactgacagtattttgatgcattgatctgcttgtttgttgtaacaaaatttaaaaataaagagtttcctttttgttgctctccttacctcctgatggtatctagtatctaccaactgacactatattgcttctctttacatacgtatcttgctcgatgccttctccctagtgttgaccagtgttactcacatagtctttgctcatttcattgtaatgcagataccaagcgggagctcgacgtccctcagcagtcgctgtgcgataccatgctagccgaaaaaacccgttccataatcaaagcaaccgttcctgttttggaacagcagggcactgtcatcacgcgtacattctacaaaaatatgcttactgaacacaccgaattacttaatatttttaacagaactaatcaaaaggttggcgcacaaccaaatgccttggccactactgttttggcagcggctaagaacattgacgatttgtctgtgcttatggaccatgtcaagcaaattggccacaagcatcgtgccttgcaaattaaacctgagcattatccaatcgttggtgagtacttgttaaaagcaatcaaggaagttttaggcgatgctgcgactccagagataattaatgcatggggcgaggcttaccaagcaattgctgacatcttcatcactgttgaaaaaaaaatgtacgaagaagctttatggccaggttggaaaccatttgacattactgccaaagagtacgttgcttcagatattgttgaatttactgttaagccaaagttcggttctggtattgaattggaaagcttgccaatcactccaggtcagtatattacggtaaacactcacccaattagacaggaaaaccaatacgacgctttaagacactactctctttgttctgcttcaactaaaaatggtttacgatttgcagtaaagatggaagctgccagagaaaattttcctgcaggattagtctctgaatatttacacaaggacgctaaagttggtgatgaaattaagcttagtgctccggctggtgatttcgcaataaataaagagttgatacaccaaaacgaagttccattggtgttactatcgtctggtgttggtgttacaccacttttagctatgttagaagaacaagtcaaatgcaacccaaataggccaatttactggattcaatcttcctatgatgaaaagactcaagcattcaaaaaacatgtagatgaactattagctgaatgtgcgaatgtcgacaaaataattgttcatactgatactgaaccactgattaatgctgcattcttgaaggaaaagtcacctgcgcatgccgatgtctacacttgcggctctttagcttttatgcaagctatgattggtcatctaaaagaactagagcatcgtgatgatatgattcactatgaaccatttggtccaaagatgtcaaccgtgcaagtttagatcgc

SEQ ID NO: 266 - DNA, 10963 bp, Artificial
  pMON95622
gggccctgatcacctgtcgtacagtatttctacatttgatgtgtgatttgtgaagaacatcaaacaaaacaagcactggctttaatatgatgataagtattatggtaattaattaattggcaaaaacaacaatgaagctaaaattttatttattgagccttgcggttaatttcttgtgatgatctttttttttattttctaattatatatagtttcctttgctttgaaatgctaaaggtttgagagagttatgctctttttttcttcctctttcttttttaactttatcatacaaattttgaataaaaatgtgagtacattgagctcatttaaataagcttgatggggatcagattgtcgtttcccgccttcagtttaaactatcagtgtttgacaggatatattggcgggtaaacctaagagaaaagagcgtttattagaataatcggatatttaaaagggcgtgaaaaggtttatccgttcgtccatttgtatgtgcatgccaaccacagggttcccctcgggagtgcttggcattccgtgcgataatgacttctgttcaaccacccaaacgtcggaaagcctgacgacggagcagcattccaaaaagatcccttggctcgtctgggtcggctagaaggtcgagtgggctgctgtggcttgatccctcaacgcggtcgcggacgtagcgcagcgccgaaaaatcctcgatcggaggaccgaaggagctaaccgcttttttgcacaacatgggggatcatgtaactcgccttgatcgttgggaaccggagctgaatgaagccataccaaacgacgagcgtgacaccacgatgcctgcagcatctaacgcttgagttaagccgcgccgcgaagcggcgtcggcttgaacgaattgttagacattatttgccgactaccttggtgatctcgcctttcacgtagtgaacaaattcttccaactgatctgcgcgcgaggccaagcgatcttcttgtccaagataagcctgcctagcttcaagtatgacgggctgatactgggccggcaggcgctccattgcccagtcggcagcgacatccttcggcgcgattttgccggttactgcgctgtaccaaatgcgggacaacgtaagcactacatttcgctcatcgccagcccagtcgggcggcgagttccatagcgttaaggtttcatttagcgcctcaaatagatcctgttcaggaaccggatcaaagagttcctccgccgctggacctaccaaggcaacgctatgttctcttgcttttgtcagcaagatagccagatcaatgtcgatcgtggctggctcgaagatacctgcaagaatgtcattgcgctgccattctccaaattgcagttcgcgcttagctggataacgccacggaatgatgtcgtcgtgcacaacaatggtgacttctacagcgcggagaatctcgctctctccaggggaagccgaagtttccaaaaggtcgttgatcaaagctcgccgcgttgtttcatcaagccttacggtcaccgtaaccagcaaatcaatatcactgtgtggcttcaggccgccatccactgcggagccgtacaaatgtacggccagcaacgtcggttcgagatggcgctcgatgacgccaactacctctgatagttgagtcgatacttcggcgatcaccgcttccctcatgatgtttaactcctgaattaagccgcgccgcgaagcggtgtcggcttgaatgaattgttaggcgtcatcctgtgctcccgacctgcagcaatggcaacaacgttgcgcaaactattaactggcgaactacttactctagcttcccggcaacaattaatagactggatggaggcggataaagttgcaggaccacttctgcgctcggcccttccggctggctggtttattgctgataaatctggagccggtgagcgtgggtctcgcggtatcattgcagcactggggccagatggtaagccctcccgtatcgtagttatctacacgacggggagtcaggcaactatggatgaacgaaatagacagatcgctgagataggtgcctcactgattaagcattggtaactgtcagaccaagtttactcatatatactttagattgatttaaaacttcatttttaatttaaaaggatctaggtgaagatcctttttgataatctcatgaccaaaatcccttaacgtgagttttcgttccactgagcgtcagaccccgtagaaaagatcaaaggatcttcttgagatcctttttttctgcgcgtaatctgctgcttgcaaacaaaaaaaccaccgctaccagcggtggtttgtttgccggatcaagagctaccaactctttttccgaaggtaactggcttcagcagagcgcagataccaaatactgtccttctagtgtagccgtagttaggccaccacttcaagaactctgtagcaccgcctacatacctcgctctgctaatcctgttaccagtggctgctgccagtggcgataagtcgtgtcttaccgggttggactcaagacgatagttaccggataaggcgcagcggtcgggctgaacggggggttcgtgcacacagcccagcttggagcgaacgacctacaccgaactgagatacctacagcgtgagctatgagaaagcgccacgcttcccgaagggagaaaggcggacaggtatccggtaagcggcagggtcggaacaggagagcgcacgagggagcttccagggggaaacgcctggtatctttatagtcctgtcgggtttcgccacctctgacttgagcgtcgatttttgtgatgctcgtcaggggggcggagcctatggaaaaacgccagcaacgcggcctttttacggttcctggccttttgctggccttttgctcacatgttctttcctgcgttatcccctgattctgtggataaccgtattaccgcctttgagtgagctgataccgctcgccgcagccgaacgaccgagcgcagcgagtcagtgagcgaggaagcggaagagcgcctgatgcggtattttctccttacgcatctgtgcggtatttcacaccgcatatggtgcactctcagtacaatctgctctgatgccgcatagttaagccagtatacactccgctatcgctacgtgactgggtcatggctgcgccccgacacccgccaacacccgctgacgcgccctgacgggcttgtctgctcccggcatccgcttacagacaagctgtgaccgtctccgggagctgcatgtgtcagaggttttcaccgtcatcaccgaaacgcgcgaggcagctgcggtaaagctcatcagcgtggtcgtgaagcgattcacagatgtctgcctgttcatccgcgtccagctcgttgagtttctccagaagcgttaatgtctggcttctgataaagcgggccatgttaagggcggttttttcctgtttggtcactgatgcctccgtgtaagggggatttctgttcatgggggtaatgataccgatgaaacgagagaggatgctcacgatacgggttactgatgatgaacatgcccggttactggaacgttgtgagggtaaacaactggcggtatggatgcggcgggaccagagaaaaatcactcagggtcaatgccagcgcttcgttaatacagatgtaggtgttccacagggtagccagcagcatcctgcgatgcagatccggaacataatggtgcagggcgctgacttccgcgtttccagactttacgaaacacggaaaccgaagaccattcatgttgttgctcaggtcgcagacgttttgcagcagcagtcgcttcacgttcgctcgcgtatcggtgattcattctgctaaccagtaaggcaaccccgccagcctagccgggtcctcaacgacaggagcacgatcatgcgcacccgtggccaggacccaacgctgcccgagatgcgccgcgtgcggctgctggagatggcggacgcgatggatatgttctgccaagggttggtttgcgcattcacagttctccgcaagaattgattggctccaattcttggagtggtgaatccgttagcgaggtgccgccggcttccattcaggtcgaggtggcccggctccatgcaccgcgacgcaacgcggggaggcagacaaggtatagggcggcgcctacaatccatgccaacccgttccatgtgctcgccgaggcggcataaatcgccgtgacgatcagcggtccagtgatcgaagttaggctggtaagagccgcgagcgatccttgaagctgtccctgatggtcgtcatctacctgcctggacagcatggcctgcaacgcgggcatcccgatgccgccggaagcgagaagaatcataatggggaaggccatccagcctcgcgtcgcgaacgccagcaagacgtagcccagcgcgtcggccgccatgccggcgataatggcctgcttctcgccgaaacgtttggtggcgggaccagtgacgaaggcttgagcgagggcgtgcaagattccgaataccgcaagcgacaggccgatcatcgtcgcgctccagcgaaagcggtcctcgccgaaaatgacccagagcgctgccggcacctgtcctacgagttgcatgataaagaagacagtcataagtgcggcgacgatagtcatgccccgcgcccaccggaaggagctgactgggttgaaggctctcaagggcatcggtcgatcgaccctttccgacgctcaccgggctggttgccctcgccgctgggctggcggccgtctatggccctgcaaacgcgccagaaacgccgtcgaagccgtgtgcgagacaccgcggccggccgccggcgttgtggataccacgcggaaaacttggccctcactgacagatgaggggcggacgttgacacttgaggggccgactcacccggcgcggcgttgacagatgaggggcaggctcgatttcggccggcgacgtggagctggccagcctcgcaaatcggcgaaaacgcctgattttacgcgagtttcccacagatgatgtggacaagcctggggataagtgccctgcggtattgacacttgaggggcgcgactactgacagatgaggggcgcgatccttgacacttgaggggcagagtgatgacagatgaggggcgcacctattgacatttgaggggctgtccacaggcagaaaatccagcatttgcaagggtttccgcccgtttttcggccaccgctaacctgtcttttaacctgcttttaaaccaatatttataaaccttgtttttaaccagggctgcgccctgtgcgcgtgaccgcgcacgccgaaggggggtgcccccccttctcgaaccctcccggcccgctaacgcgggcctcccatccccccaggggctgcgcccctcggccgcgaacggcctcaccccaaaaatggcagccaagctaggaaaagtcccatgtggatcactccgttgccccgtcgctcaccgtgttggggggaaggtgcacatggctcagttctcaatggaaattatctgcctaaccggctcagttctgcgtagaaaccaacatgcaagctccaccgggtgcaaagcggcagcggcggcaggatatattcaattgtaaatggcttcatgtccgggaaatctacatggatcagcaatgagtatgatggtcaatatggagaaaaagaaagagtaattaccaattttttttcaattcaaaaatgtagatgtccgcagcgttattataaaatgaaagtacattttgataaaacgacaaattacgatccgtcgtatttataggcgaaagcaataaacaaattattctaattcggaaatctttatttcgacgtgtctacattcacgtccaaatgggggcttagatgagaaacttcacgatcgatgcggccaccactcgagaagcttactagtcaacaattggccaatctttgttctaaattgctaataaacgaccatttccgtcaattctccttggttgcaacagtctacccgtcaaatgtttactaatttataagtgtgaagtttgaattatgaaagacgaaatcgtattaaaaattcacaagaataaacaactccatagattttcaaaaaaacagtcacgagaaaaaaaccacagtccgtttgtctgctcttctagtttttattatttttctattaatagttttttgttatttcgagaataaaatttgaacgatgtccgaaccacaaaagccgagccgataaatcctaagccgagcctaactttagccgtaaccatcagtcacggctcccgggctaattcatttgaaccgaatcataatcaacggtttagatcaaactcaaaacaatctaacggcaacatagacgcgtcggtgagctaaaaagagtgtgaaagccaggtcaccatagcattgtctctcccagattttttatttgggaaataatagaagaaatagaaaaaaataaaagagtgagaaaaatcgtagagctatatattcgcacatgtactcgtttcgctttccttagtgttagctgctgccgctgttgtttctcctccatttctctatctttctctctcgctgcttctcgaatcttctgtatcatcttcttcttcttcaaggtgagtctctagatccgttcgcttgattttgctgctcgttagtcgttattgttgattctctatgccgatttcgctagatctgtttagcatgcgttgtggttttatgagaaaatctttgttttgggggttgcttgttatgtgattcgatccgtgcttgttggatcgatctgagctaattcttaaggtttatgtgttagatctatggagtttgaggattcttctcgcttctgtcgatctctcgctgttatttttgtttttttcagtgaagtgaagttgtttagttcgaaatgacttcgtgtatgctcgattgatctggttttaatcttcgatctgttaggtgttgatgtttacaagtgaattctagtgttttctcgttgagatctgtgaagtttgaacctagttttctcaataatcaacatatgaagcgatgtttgagtttcaataaacgctgctaatcttcgaaactaagttgtgatctgattcgtgtttacttcatgagcttatccaattcatttcggtttcattttactttttttttagtgaaccatggcgcaagttagcagaatctgcaatggtgtgcagaacccatctcttatctccaatctctcgaaatccagtcaacgcaaatctcccttatcggtttctctgaagacgcagcagcatccacgagcttatccgatttcgtcgtcgtggggattgaagaagagtgggatgacgttaattggctctgagcttcgtcctcttaaggtcatgtcttctgtttccacggcgtgcatgcttcatggagcttcatctaggccagctactgccaggaagtctagcgggctcagtggcaccgtgcgcatccctggcgataaaagtatttcacacaggagcttcatgttcggaggacttgctagtggagagacgagaatcactggtttgcttgagggcgaagatgttatcaacaccggtaaggcgatgcaagcaatgggtgccagaatccgaaaagagggcgatacgtggatcatcgacggtgttggtaacggaggattgctcgctcccgaagcgccacttgactttgggaacgcagctacggggtgccgtcttactatgggactggtaggcgtgtatgactttgactctaccttcatcggtgacgcgagcctcactaagagaccaatgggacgagtgctgaatcccctgagggagatgggtgtccaggtgaaatctgaggatggtgatcgtcttccggttactctgcgaggccccaagacccccacgccaatcacgtacagggttccgatggcgtcagcacaggtcaagtcagcggtactcctggcgggcctcaacacacctggaatcacaaccgtgattgaacccatcatgactagagaccacacggagaagatgttgcagggtttcggcgctaatctaacggtcgaaaccgacgccgacggcgtgaggacaatccgcttggagggcagaggtaaactgactggccaagtcatcgatgtgcctggagatccctcgtccacagcgtttcccctcgtagctgcgttgctcgtccctggatctgatgtgacgatcctgaatgtcctcatgaatccaactagaaccggcctcatcctcacattgcaggagatgggtgctgacatcgaggttatcaatcctaggttggcaggtggagaggatgtggccgatctgcgcgtgcgttctagtacactcaaaggcgtgaccgtccctgaggatcgcgctccatccatgatcgacgagtaccccattctcgccgttgctgctgcgtttgccgagggcgcaactgtaatgaacggccttgaggagttgagggttaaggagagtgacaggctgtccgcggtggcgaatggcctgaagctaaacggcgtggactgcgacgaaggtgaaacgtcccttgtagtccgtggtcgcccagacgggaaggggttggggaatgcttcgggagctgctgtggcgacgcaccttgatcatagaatcgccatgtcatttctggtgatgggacttgtctccgagaatccggtgaccgttgacgatgctaccatgatcgccacctcctttcctgagttcatggacctcatggcaggcttgggggccaagatcgagctgtctgatactaaggccgcttgaattcccgatcgttcaaacatttggcaataaagtttcttaagattgaatcctgttgccggtcttgcgatgattatcatataatttctgttgaattacgttaagcatgtaataattaacatgtaatgcatgacgttatttatgagatgggtttttatgattagagtcccgcaattatacatttaatacgcgatagaaaacaaaatatagcgcgcaaactaggataaattatcgcgcgcggtgtcatctatgttactagatcggggatcccacgtgcggaccgcctgcaggccgcgttatcaagctaactgcaggtccgatgtgagacttttcaacaaagggtaatatccggaaacctcctcggattccattgcccagctatctgtcactttattgtgaagatagtggaaaaggaaggtggctcctacaaatgccatcattgcgataaaggaaaggccatcgttgaagatgcctctgccgacagtggtcccaaagatggacccccacccacgaggagcatcgtggaaaaagaagacgttccaaccacgtcttcaaagcaagtggattgatgtgatggtccgattgagacttttcaacaaagggtaatatccggaaacctcctcggattccattgcccagctatctgtcactttattgtgaagatagtggaaaaggaaggtggctcctacaaatgccatcattgcgataaaggaaaggccatcgttgaagatgcctctgccgacagtggtcccaaagatggacccccacccacgaggagcatcgtggaaaaagaagacgttccaaccacgtcttcaaagcaagtggattgatgtgatatctccactgacgtaagggatgacgcacaatcccactatccttcgcaagacccttcctctatataaggaagttcatttcatttggagaggaccaggtggtaccggcgcgcctcagcagtcgctgtcgttaccatgcttgacgctcaaaccatcgctacagtaaaagccaccatccctttactggtggaaacggggccaaagttaaccgcccatttctacgaccgtatgtttactcataacccagaactcaaagaaatttttaacatgagtaaccagcgtaatggcgatcaacgtgaagccctgtttaacgctattgccgcctacgccagtaatattgaaaacctgcctgcgctgctgccagcggtagaaaaaatcgcgcagaagcacaccagcttccagatcaaaccggaacagtacaacatcgtcggtgaacacctgttggcaacgctggacgaaatgttcagcccggggcaggaagtgctggacgcgtggggtaaagcctatggtgtactggctaatgtatttatcaatcgcgaggcggaaatctataacgaaaacgccagcaaagccggtggttgggaaggtactcgcgatttccgcattgtggctaaaacaccgcgcagcgcgcttatcaccagcttcgaactggagccggtcgacggtggcgcagtggcagaataccgtccggggcaatatctcggcgtctggctgaagccggaaggtttcccacatcaggaaattcgtcagtactctttgactcgcaaaccggatggcaaaggctatcgtattgcggtgaaacgcgaagagggtgggcaggtatccaactggttgcacaatcacgccaatgttggcgatgtcgtgaaactggtcgctccggcaggtgatttctttatggctgtcgcagatgacacaccagtgacgttaatctctgccggtgttggtcaaacgccaatgctggcaatgctcgacacgctggcaaaagcaggccacacagcacaagtgaactggttccatgcggcagaaaatggcgatgttcacgcctttgccgatgaagttaaggaactggggcagtcactgccgcgctttaccgcgcacacctggtatcgtcagccgagcgaagccgatcgcgctaaaggtcagtttgatagcgaaggtctgatggatttgagcaaactggaaggtgcgttcagcgatccgacaatgcagttctatctctgcggcccggttggcttcatgcagtttaccgcgaaacagttagtggatctgggcgtgaagcaggaaaacattcattacgaatgctttggcccgcataaggtgctgtagaacccagcggtactcgctgaggcgatcgc

SEQ ID NO: 267 - DNA, 28 bp, artificial
  primer
gatgcacacatagtgacatgctaatcac

SEQ ID NO: 268 - DNA, 33 bp, Artificial
  primer
attacacataacacacaactttgatgcccacat

SEQ ID NO: 269 - DNA, 32 bp, Artificial
  primer
ggatgatctctttctcttattcagataattag

SEQ ID NO: 270 - DNA, 20 bp, Artificial
  primer
cgtccctgccctttgtacac

SEQ ID NO: 271 - DNA, 21 bp, Artificial
  primer
cgaacacttcaccggatcatt

SEQ ID NO: 272 - DNA, 21 bp, Artificial
  primer
ccgcccgtcgctcctaccgat
